(19) United States
(12) Patent Application Publication
(10) Pub. No.: US 2024/0401018 A1
(43) Pub. Date: Dec. 5, 2024

(54) EVOLVED DOUBLE-STRANDED DNA DEAMINASE BASE EDITORS AND METHODS OF USE

(71) Applicants: The Broad Institute, Inc., Cambridge, MA (US); President and Fellows of Harvard College, Cambridge, MA (US)

(72) Inventors: David R. Liu, Cambridge, MA (US); Beverly Mok, Cambridge, MA (US)

(73) Assignees: The Broad Institute, Inc., Cambridge, MA (US); President and Fellows of Harvard College, Cambridge, MA (US)

(21) Appl. No.: 18/286,547

(22) PCT Filed: Apr. 12, 2022
(86) PCT No.: PCT/US2022/024499

§ 371 Date: Oct. 11, 2023

Related U.S. Application Data
(60) Provisional application No. 63/322,210, filed on Mar. 21, 2022.
(60) Provisional application No. 63/309,485, filed on Feb. 11, 2022.
(60) Provisional application No. 63/174,029, filed on Apr. 12, 2021.

(51) Int. Cl. C12N 9/78; C12N 9/22

(52) U.S. Cl. CPC C12N 9/78; C12N 9/22; C12Y 305/04005

(57) ABSTRACT

The specification provides programmable base editors that are capable of introducing a nucleotide change and/or which could alter or modify the nucleotide sequence at a target site in a double-stranded nucleotide sequence, such as, a chromosome, genome, or a mitochondrial DNA (mtDNA), with high specificity and efficiency. Moreover, the disclosure provides fusion proteins and compositions comprising a programmable DNA binding protein (e.g., a mitoTALE, a mitoZFP, or a CRISPR/Cas9) and evolved double-stranded DNA deaminase domains that is capable of being delivered to a cell nucleus and/or a mitochondria and carrying out precise installation of nucleotide changes in the target a double-stranded nucleotide sequence, such as, a chromosome, genome, or mtDNA. The fusion proteins and compositions are not limited for use with mtDNA, but may be used for base editing of any double-stranded target DNA.

### GOVERNMENT SUPPORT

[0001] This invention was made with government support under grant numbers AI080609, AI142756, HG009490, EB027793, EB031172, EB022376, GM122455, GM118062, DK089507, and GM095450 awarded by the National Institutes of Health, and grant number HDTRA1-13-1-0014 awarded by the Department of Defense. The government has certain rights in the invention.

### BACKGROUND OF THE INVENTION

[0002] Inherited or acquired mutations in mitochondrial DNA (mtDNA) can profoundly impact cell physiology and are associated with a spectrum of human diseases, ranging from rare inborn errors of metabolism,⁴ certain cancers,⁵ age-associated neurodegeneration,⁶ and even the aging process itself.^{7,8} Tools for introducing specific modifications to mtDNA are needed both for modeling diseases and for their therapeutic potential. The development of such tools, however, has been constrained in part by the challenge of transporting RNAs into mitochondria, including guide RNAs required to facilitate nucleic acid modification and/or editing using CRISPR-associated proteins.⁹

[0003] Each mammalian cell contains hundreds to thousands of copies of circular mtDNA.¹⁰ Homoplasmy refers to a state in which all mtDNA molecules are identical, while heteroplasmy refers to a state in which a cell contains a mixture of wild-type and mutant mtDNA. Current approaches to engineering and/or altering mtDNA rely on RNA-free DNA-binding proteins, such as transcription activator-like effectors nucleases (mitoTALENs)^{11,17} and zinc finger nucleases fused to mitochondrial targeting sequences (mitoZFNs), to induce double-strand breaks (DSBs).¹⁸⁻²⁰ Upon cleavage, the linearized mtDNA is rapidly degraded,²¹⁻²³ resulting in heteroplasmic shifts to favor uncut mtDNA genomes. As a candidate therapy however, this approach cannot be applied to homoplasmic mtDNA mutations²⁴ since destroying all mtDNA copies is presumed to be harmful.^{22,25} In addition, using DSBs to eliminate heteroplasmic mtDNA mutations, which tend to be functionally recessive,²⁶ implicitly requires the edited cell to restore its wild-type mtDNA copy number. During this transient period of mtDNA repopulation, the loss of mtDNA copies could cause cellular toxicity resulting in deleterious effects (e.g., apoptosis).

[0004] A favorable alternative to targeted destruction of DNA through DSBs is precision genome editing, a capability that has not yet been reported for mtDNA. The ability to precisely install or correct pathogenic mutations, rather than destroy targeted mtDNA, could accelerate our ability to model mtDNA diseases in cells and animal models, and in principle could also enable therapeutic approaches that correct pathogenic mtDNA and genomic DNA mutations.

[0005] Therefore, the development of programmable base editors that are capable of introducing a nucleotide change and/or which could alter or modify the nucleotide sequence at a target site with high specificity and efficiency within DNA, including genomic DNA and mtDNA, would substantially expand the scope and therapeutic potential of genome editing technologies.

### SUMMARY

[0006] The present disclosure is further to the inventors' discovery of a double-stranded DNA cytidine deaminase, referred to herein as “DddA,” and to its application in base editing of double-stranded nucleic acid molecules, and in particular, the editing of genomic and mitochondrial DNA, as described in Mok et al., “A bacterial cytidine deaminase toxin enables CRISPR-free mitochondrial base editing,” Nature, 2020; 583(7817): 631-637 (“Mok et al., 2020”), the entire contents of which are incorporated herein by reference. As depicted in FIG. 1A, the full-length naturally occurring DddA protein is toxic to cells. Without being bound by theory, this cellular toxicity may relate to the fact that the substrate of DddA is any double stranded DNA, including the chromosomal DNA. Thus, as described in Mok et al., the inventors found that the protein could be engineered into split DddA halves that are non-toxic to the cell and inactive on their own until brought together on a target DNA by adjacently bound programmable DNA-binding proteins (e.g., mitoTALE proteins, zinc finger proteins, or Cas9/sgRNA complexes) which bind to the DNA on either side of a site of deamination. The inventors proposed split sites within amino acid loop regions as identified by the crystal structure of DddA. They found that fusions of the split-DddA halves had the ability to deaminate double stranded DNA as a substrate when brought together at a site of deamination by a pair of programmable DNA binding proteins binding to different sites at a deamination site (or edit site).

[0007] As now disclosed herein, the inventors have used continuous evolution methods, including phage-assisted non-continuous evolution (PANCE) and phage-assisted continuous evolution (PACE), for example, as illustrated in FIG. 2, to evolve a starting point DddA protein or fragment thereof to form an evolved variant DddA or evolved fragment of DddA having one or more improved characteristics, including increased deaminase activity and/or expanded sequence contexts in which deamination may occur (e.g., expanding beyond the canonical DdCBE sequence context of TC, including non-TC contexts such as but not limited to AC and CC targets).

[0008] The present disclosure provides methods for making such DddA variants (e.g., evolution methods such as PANCE, PACE, or a combination thereof), methods of making base editors comprising said variants, base editors comprising fusion proteins of an evolved variant DddA and a programmable DNA binding protein (e.g., a mitoTALE, zinc finger, or napDNAbp), DNA vectors encoding said base editors, methods for delivery said based editors to cells, and methods for using said base editors to edit a target double stranded DNA molecule, including a mitochondrial genome or a genomic genome.

[0009] In the case of mitochondrial DNA (mtDNA), inherited or acquired mutations in mtDNA can profoundly impact cell physiology and are associated with a spectrum of human diseases, ranging from rare inborn errors of metabolism,⁴ certain cancers,⁵ age-associated neurodegeneration,⁶ and even the aging process itself.^{7,8} Tools for introducing specific modifications to mtDNA are urgently needed both for modeling diseases and for their therapeutic potential. The present disclosure provides such tools through the use of the newly discovered variants of the canonical DddA described herein in base editing of double-stranded DNA substrates, including genomic DNA, plasmid DNA, and mtDNA.

[0010] Each mammalian cell contains hundreds to thousands of copies of a circular mtDNA¹⁰. Homoplasmy refers to a state in which all mtDNA molecules are identical, while heteroplasmy refers to a state in which a cell contains a mixture of wild-type and mutant mtDNA. Current approaches to engineer mtDNA rely on DNA-binding proteins such as transcription activator-like effectors nucleases (mitoTALENs)^{11,17} and zinc finger nucleases (mitoZFNs)¹⁸⁻²⁰ fused to mitochondrial targeting sequences to induce double-strand breaks (DSBs). Such proteins do not rely on nucleic acid programmability (e.g., such as with Cas9 domains). Linearized mtDNA is rapidly degraded,²¹⁻²³ resulting in heteroplasmic shifts to favor uncut mtDNA genomes. As a candidate therapy however, this approach cannot be applied to homoplasmic mtDNA mutations²⁴ since destroying all mtDNA copies is presumed to be harmful.^{22,25} In addition, using DSBs to eliminate heteroplasmic mtDNA mutations, which tend to be functionally recessive,²⁶ implicitly requires the edited cell to restore its wild-type mtDNA copy number. During this transient period of mtDNA repopulation, the loss of mtDNA copies could result in cellular toxicity.

[0011] As described herein, the disclosure provides a platform of precision genome editing using an evolved double-stranded DNA deaminase (evolved DddA or DddA variant) and a programmable DNA binding protein, such as a TALE domain, zinc finger binding domain, or a napDNAbp (e.g., Cas9), to target the deamination of a target base, which through cellular DNA repair and/or replication, is converted to a new base, thereby installing a base edit at a target site. In some embodiments, the deaminase activity is a cytidine deaminase, which deaminates a cytidine, leading to a C-to-T edit at that site in a double-stranded DNA target (e.g., genomic DNA, plasmid DNA, or mtDNA). In some other embodiments, that deaminase activity is an adenosine deaminase, which deaminates an adenosine, leading to a A-to-G edit at that site. In various embodiments, the disclosure further relates to “split-constructs” and “split-delivery” of said constructs whereby to address the toxic nature of fully active DddA and DddA variants described herein when expressed inside cells (as discovered by the inventors), the DddA protein or DddA variant is “split” or otherwise divided into two or more DddA fragments which can be separately delivered, expressed, or otherwise provided to cells to avoid the toxicity of fully active DddA. Further, the DddA fragments may be delivered, expressed, or otherwise provided as separate fusion proteins to cells with programmable DNA binding proteins (e.g., zinc finger domains, TALE domains, or Cas9 domains) which are programmed to localize the DddA fragments to a target edit site, through the binding of the DNA binding proteins to DNA sites upstream and downstream of the target edit site. Once co-localized to the target edit site, the separately provided DddA fragments may associate (covalently or non-covalently) to reconstitute an active DddA protein or DddA variant with a double-stranded DNA deaminase activity. In certain embodiments where the objective is to base edit mitochondrial DNA targets, the programmable DNA binding proteins can be modified with one or more mitochondrial localization signals (MLS) so that the DddA-pDNAbp fusions or DddA variant-pDNAbp fusions are translocated into the mitochondria, thereby enabling them to act on mtDNA targets.

[0012] The inventors are believed to be the first to identify the herein disclosed DddA variants, as well as the canonical DddA, which was initially discovered as a bacterial toxin. The inventors further conceived of the idea of splitting the DddA variants into two or more domains, which apart do not have a deaminase activity (and as such, lack toxicity), but which may be reconstituted (e.g., inside the cell, and/or inside the mitochondria) to restore the deaminase activity of the protein. This allows the separate delivery DddA fragments to cells (and/or to mitochondria, specifically), or delivery of nucleic acid molecules expressing such DddA fragments to a cell, such that once present or expressed within a cell, DddA fragments may associate with one another. By “associate” it is meant the two or more DddA fragments may come into contact with one another (e.g., in a cell, at a target site in a genome, or within a mitochondria at a target mtDNA site) and form a functional DddA protein or variant within a cell (or mitochondria). The association of the two or more fragments may be through covalent interactions or non-covalent interactions. In addition, the DddA domains may be fused or otherwise non-covalently linked to a programmable DNA binding protein, such as a Cas9 domain or other napDNAbp domain, zinc finger domain or protein (ZF, ZFD, or ZFP), or a transcription activator-like effector protein (TALE), which allows for the co-localization of the two or more DddA fragments to a particular desired site in a target nucleic acid molecule which is to be edited, such that when the DddA fragments are co-localized at the desired editing site, they reform a functional DddA that is capable deaminating a target site on a double-stranded DNA molecule. In certain embodiments, the programmable DNA binding proteins can be engineered to comprise one or more mitochondrial localization signals (MLS) such that the DddA domains become translocated into the mitochondria, thereby providing a means by which to conduct base editing directly on the mitochondrial genome.

[0013] Accordingly, provided herein are compositions, kits, and methods of modifying double-stranded DNA (e.g., mitochondrial DNA or “mtDNA”) using genome editing strategies that comprise the use of a programmable DNA binding protein (“pDNAbp”) (e.g., a mitoTALE, mitoZFP, or a CRISPR/Cas9) and a double-stranded DNA deaminase (“DddA”) (e.g., a DddA variant of the canonical DddA) to precisely install nucleotide changes and/or correct pathogenic mutations in double-stranded DNA (e.g., genomic DNA, plasmid DNA, or mtDNA), rather than destroying the DNA (e.g., genomic DNA, plasmid DNA, or mtDNA) with double-strand breaks (DSBs). The present disclosure provides pDNAbp polypeptides, DddA polypeptides (e.g., DddA variants of canonical DddA), fusion proteins comprising pDNAbp polypeptides and DddA polypeptides (e.g, DddA variants of canonical DddA), nucleic acid molecules encoding the pDNAbp polypeptides, DddA polypeptides (e.g., DddA variants of canonical DddA), and fusion proteins described herein, expression vectors comprising the nucleic acid molecules described herein, cells comprising the nucleic acid molecules, expression vectors, pDNAbp polypeptides, DddA polypeptides (e.g., DddA variants of canonical DddA), and/or fusion proteins described herein, pharmaceutical compositions comprising the polypeptides, fusion proteins, nucleic acid molecules, vectors, or cells described herein, and kits comprising the polypeptides, fusion proteins, nucleic acid molecules, vectors, or cells described herein for modifying double-stranded DNA (e.g., mtDNA) by base editing.

[0014] The inventors now have used continuous evolution methods to construct novel DddA proteins (i.e., DddA variants of canonical DddA) which may be used in the base editors described herein to deaminate double-stranded DNA targets, such as genomic DNA, plasmid DNA, or mitochondrial DNA.

[0015] In some embodiments, the pDNAbps (e.g., a mitoTALE, mitoZFP, or a CRISPR/Cas) and the DddA variants described herein are expressed as fusion proteins. In other embodiments, the pDNAbps and DddA variants described herein are expressed as separate polypeptides. In various other embodiments, the fusion proteins and/or the separately expressed pDNAbps and DddAs become translocated into the mitochondria. To effect translocation, the fusion proteins and/or the separately expressed pDNAbps and DddA variants described herein can comprise one or more mitochondrial targeting sequences (MTS). To effect translocation in the nucleus in the case of genomic DNA editing, the fusion proteins and/or the separately expressed pDNAbps and DddA variants described herein can comprise one or more nuclear localization sequences (NLS).

[0016] In still other embodiments, the DddA variants described herein are administered to a cell in which base editing is desired as two or more polypeptide fragments, wherein each fragment by itself is inactive with respect to deaminase activity, but upon co-localization in the cell, e.g., inside the mitochondria or in the nucleus, the two or more fragments reconstitute the deaminase activity.

[0017] In certain embodiments, the reconstituted activity of the co-localized two or more fragments can comprise at least 5%, at least 10%, at least 15%, at least 20%, at least 25%, at least 30%, at least 35%, at least 40%, at least 45%, at least 50%, at least 55%, at least 60%, at least 65%, at least 70%, at least 71%, at least 72%, at least 73%, at least 74%, at least 75%, at least 76%, at least 77%, at least 78%, at least 79%, at least 80%, at least 81%, at least 82%, at least 83%, at least 84%, at least 85%, at least 86%, at least 87%, at least 88%, at least 89%, at least 90%, at least 91%, at least 92%, at least 93%, at least 94%, at least 95%, at least 96%, at least 97%, at least 98%, at least 99%, at least 99.5%, or at least 99.9% of the deaminase activity of a wildtype DddA or a DddA variant described herein.

[0018] In certain embodiments, the DddA (e.g., a DddA variant described herein) is separated into two fragments by dividing the DddA at a split site. A “split site” refers to a position between two adjacent amino acids (in a wildtype DddA amino acid sequence) that marks a point of division of a DddA. In certain embodiments, the DddA can have at least one split site, such that once divided at that split site, the DddA forms an N-terminal fragment and a C-terminal fragment. The N-terminal and C-terminal fragments can be the same or different sizes (or lengths), wherein the size and/or polypeptide length depends on the location or position of the split site. As used herein, reference to a “fragment” of DddA (or any other polypeptide) can be referred equivalently as a “portion.” Thus, a DddA which is divided at a split site can form an N-terminal portion and a C-terminal portion. Preferably, the N-terminal fragment (or portion) and the C-terminal fragment (or portion) or DddA do not have deaminase activity, or have a reduced deaminase activity that is reduced by at least 10%, or at least 15%, or at least 20%, or at least 25%, or at least 30%, or at least 35%, or at least 40%, or at least 45%, or at least 50%, or at least 55%, or at least 60%, or at least 65%, or at least 70%, or at least 75%, or at least 80%, or at least 85%, or at least 90%, or at least 95%, or up to 100% relative to the wild type DddA activity.

[0019] In various embodiments, a DddA may be split into two or more inactive fragments by directly cleaving the DddA at one or more split sites. Direct cleaving can be carried out by a protease (e.g., trypsin) or other enzyme or chemical reagent. In certain embodiments, such chemical cleavage reactions can be designed to be site-selective (e.g., Elashal and Raj, “Site-selective chemical cleavage of peptide bonds,” Chemical Communications, 2016, Vol. 52, pages 6304-6307, the contents of which are incorporated herein by reference.) In other embodiments, chemical cleavage reactions can be designed to be non-selective and/or occur in a random fashion.

[0020] In other embodiments, the two or more inactive DddA fragments can be engineered as separately expressed polypeptides. For instance, for a DddA having one split site, the N-terminal DddA fragment could be engineered from a first nucleotide sequence that encodes the N-terminal DddA fragment (which extends from the N-terminus of the DddA up to and including the residue on the amino-terminal side of the split site). In such an example, the C-terminal DddA fragment could be engineered from a second nucleotide sequence that encodes the C-terminal DddA fragment (which extends from the carboxy-terminus of the split site up to including the natural C-terminus of the DddA protein). The first and second nucleotide sequences could be on the same or different nucleotide molecules (e.g., the same or different expression vectors).

[0021] In various embodiments, the N-terminal portion of a split DddA variant may be referred to as “DddA-N half” and the C-terminal portion of a split DddA variant may be referred to as the “DddA-C half.” Reference to the term “half” does not connote the requirement that the DddA-N and DddA-C portions are identically half of the size and/or sequence length of a complete DddA, or that the split site is required to be at the midpoint of the complete DddA polypeptide. To the contrary, and as noted above, the split site can be between any pair of residues in the DddA polypeptide, thereby giving rise to half portions which are unequal in size and/or sequence length. In certain embodiments, the split site is within a loop region of a DddA variant described herein.

[0022] Accordingly, in one aspect, the disclosure relates to a pair of fusion proteins useful for making modifications to the sequence of mitochondrial DNA (e.g., mtDNA). The pair of fusion proteins, in some embodiments, can comprise a first fusion protein comprising a first pDNAbp (e.g., a mitoTALE, mitoZFP, or a CRISPR/Cas9) and a first portion or fragment of a DddA variant, and a second fusion protein comprising a second pDNAbp (e.g., mitoTALE, mitoZFP, or a CRISPR/Cas9) and a second portion or fragment of a DddA variant, such that the first and the second portions of the DddA variant reconstitute a DddA variant upon co-localization in a cell and/or mitochondria. In certain embodiments, that first portion of the DddA variant is an N-terminal fragment of the DddA variant and the second portion of the DddA variant is C-terminal fragment of the DddA variant. In other embodiments, the first portion of the DddA variant is a C-terminal fragment of the DddA variant and the second portion of the DddA variant is an N-terminal fragment of the DddA variant.

[0023] In this aspect, the structure of the pair of fusion proteins can be, for example:
[0024] [pDNAbp]-[DddA half^{A}] and [pDNAbp]-[DddA half^{B}];
[0025] [DddA-half^{A}]-[pDNAbp] and [DddA-half^{B}]-[pDNAbp];
[0026] [pDNAbp]-[DddA half^{A}] and [DddA-half^{B}]-[pDNAbp]; or
[0027] [DddA-half^{A}]-[pDNAbp] and [pDNAbp]-[DddA half^{B}], wherein “A” or “B” can be the N-terminal or C-terminal half of DddA.

[0028] In another aspect, the disclosure relates to a pair of fusion proteins useful for making modifications to the sequence of mitochondrial DNA (e.g., mtDNA). The pair of fusion proteins can comprise a first fusion protein comprising a first mitoTALE and a first portion or fragment of a DddA, and a second fusion protein comprising a second mitoTALE and a second portion or fragment of a DddA, such that the first and the second portions of the DddA, upon co-localization in a cell and/or mitochondria, are reconstituted as an active DddA. In certain embodiments, that first portion of the DddA is an N-terminal fragment of a DddA and the second portion of the DddA is C-terminal fragment of a DddA. In other embodiments, the first portion of the DddA is a C-terminal fragment of a DddA and the second portion of the DddA is an N-terminal fragment of a DddA. In this aspect, the structure of the pair of fusion proteins can be, for example:
[0029] [mitoTALE]-[DddA half^{A}] and [mitoTALE]-[DddA half^{B}];
[0030] [DddA-half^{A}]-[pDNAbp] and [DddA-half^{B}]-[mitoTALE];
[0031] [mitoTALE]-[DddA half^{A}] and [DddA-half^{B}]-[mitoTALE]; or
[0032] [DddA-half^{A}]-[mitoTALE] and [mitoTALE]-[DddA half^{B}], wherein “A” or “B” can be the N-terminal or C-terminal half of DddA.

[0033] In yet another aspect, the disclosure relates to a pair of fusion proteins useful for making modifications to the sequence of mitochondrial DNA (e.g., mtDNA). The pair of fusion proteins can comprise a first fusion protein comprising a first mitoZFP and a first portion or fragment of a DddA, and a second fusion protein comprising a second mitoZFP and a second portion or fragment of a DddA, such that the first and the second portions of the DddA, upon co-localization in a cell and/or mitochondria, are reconstituted as an active DddA. In certain embodiments, that first portion of the DddA is an N-terminal fragment of a DddA and the second portion of the DddA is C-terminal fragment of a DddA. In other embodiments, the first portion of the DddA is a C-terminal fragment of a DddA and the second portion of the DddA is an N-terminal fragment of a DddA. In this aspect, the structure of the pair of fusion proteins can be, for example:
[0034] [mitoZFP]-[DddA half^{A}] and [mitoZFP]-[DddA half^{B}];
[0035] [DddA-half^{A}]-[pDNAbp] and [DddA-half^{B}]-[mitoZFP];
[0036] [mitoZFP]-[DddA half^{A}] and [DddA-half^{B}]-[mitoZFP]; or
[0037] [DddA-half^{A}]-[mitoZFP] and [mitoZFP]-[DddA half^{B}], wherein “A” or “B” can be the N-terminal or C-terminal half of DddA.

[0038] In yet another aspect, the disclosure relates to a pair of fusion proteins useful for making modifications to the sequence of mitochondrial DNA (e.g., mtDNA). The pair of fusion proteins can comprise a first fusion protein comprising a first Cas9 domain and a first portion or fragment of a DddA, and a second fusion protein comprising a second Cas9 domain and a second portion or fragment of a DddA, such that the first and the second portions of the DddA, upon co-localization in a cell and/or mitochondria, are reconstituted as an active DddA. In certain embodiments, that first portion of the DddA is an N-terminal fragment of a DddA (i.e., “DddA half^{A}” as shown in FIGS. 1A-1E) and the second portion of the DddA is C-terminal fragment of a DddA (i.e., “DddA half^{B}” as shown in FIGS. 1A-1E). In other embodiments, the first portion of the DddA is a C-terminal fragment of a DddA and the second portion of the DddA is an N-terminal fragment of a DddA. In this aspect, the structure of the pair of fusion proteins can be, for example:
[0039] [Cas9]-[DddA half^{A}] and [Cas9]-[DddA half^{B}];
[0040] [DddA-half^{A}]-[Cas9] and [DddA-half^{B}]-[Cas9];
[0041] [Cas9]-[DddA half^{A}] and [DddA-half^{B}]-[Cas9]; or
[0042] [DddA-half^{A}]-[Cas9] and [Cas9]-[DddA half^{B}], wherein “A” or “B” can be the N-terminal or C-terminal half of DddA.

[0043] In each instance above of “]-[” can be in reference to a linker sequence.

[0044] In some embodiments, a first fusion protein comprises, a first mitochondrial transcription activator-like effector (mitoTALE) domain and a first portion of a DNA deaminase effector (DddA).

[0045] In some embodiments, the first portion of the DddA comprises an N-terminal truncated DddA. In some embodiments, the first mitoTALE domain is configured to bind a first nucleic acid sequence proximal to a target nucleotide. In some embodiments, the first portion of a DddA is linked to the remainder of the first fusion protein by the C-terminus of the first portion of a DddA.

[0046] In some embodiments, a second fusion protein comprises, a second mitoTALE domain and a second portion of a DddA. In some embodiments, the second portion of the DddA comprises a C-terminal truncated DddA. In some embodiments, the second mitoTALE domain is configured to bind a second nucleic acid sequence proximal to a nucleotide opposite the target nucleotide. In some embodiments, the second portion of a DddA is linked to the remainder of the second fusion protein by the C-terminus of the second portion of a DddA.

[0047] In some embodiments, the first or second fusion protein is the result of truncations of a DddA at a residue site selected from the group comprising: 62, 71, 73, 84, 94, 108, 110, 122, 135, 138, 148, and 155. In some embodiments, the first or second fusion protein is the result of truncations of a DddA at a residue 148.

[0048] In some embodiments, the first or second fusion protein further comprises a linker. In some embodiments, the linker is positioned between the first mitoTALE and the first portion of a DddA and/or between the second mitoTALE and the second portion of a DddA. In some embodiments, the linker is at least two amino acids and no greater than sixteen amino acid residues in length. In some embodiments, the linker is two amino acid residues.

[0049] In some embodiments, the first or second fusion protein further comprises at least one uracil glycosylase inhibitor. In some embodiments, the first or second fusion protein the at least one glycosylase inhibitor is attached to the C-terminus of the first and/or second portion of a DddA.

[0050] In another aspect, the disclosure relates to a pair of fusion proteins comprising: (a) a first fusion protein disclosed herein; and (b) a second fusion protein disclosed herein, wherein the first pDNAbp (e.g., mitoTALE, mitoZFP, or mitoCas9) of the first fusion protein is configured to bind a first nucleic acid sequence proximal to a target nucleotide and the second pDNAbp (e.g., mitoTALE, mitoZFP, or mitoCas9) of the second fusion protein is configured to bind a second nucleic acid sequence proximal to a nucleotide opposite the target nucleotide. In some embodiments, the first nucleic acid sequence of the pair of fusion proteins is upstream of the target nucleotide and the second nucleic acid of the pair of fusion proteins is upstream of a nucleic acid of the complementary nucleotide.

[0051] In another aspect the disclosure relates to a pair of fusion proteins, wherein the first and second fusion proteins disclosed herein, are configured to form a dimer, and dimerization of the first and second fusion proteins at closely spaced nucleic acid sequences reconstitutes at least partial activity of a full length DddA. In some embodiments, the dimerization of the pair of fusion proteins facilitates deamination of the target nucleotide.

[0052] In another aspect, the disclosure relates to a recombinant vector comprising an isolated nucleic acid as disclosed herein.

[0053] In some embodiments, the vector is part of a composition, the composition comprising the vector and a pharmaceutically acceptable excipient.

[0054] In another aspect, the disclosure relates to an isolated cell comprising a nucleic acid as disclosed. In some embodiments, the isolated cell is a mammalian cell. In some embodiments, the mammalian cell is a human cell.

[0055] In another aspect, the disclosure relates to a method of treating a subject having, at risk of having, or suspected of having, a disorder comprising administering an effective amount of a pair of fusion proteins as described herein, a nucleic acid as described herein, a vector as disclosed herein, a composition as described herein, and/or an isolated cell as described herein. For example, the disorder can be a mitochondrial disorder, such as, MELAS/Leigh syndrome or Leber's hereditary optic neuropathy.

[0056] In another aspect, the disclosure relates to a method of editing a nucleic acid in a subject, comprising: (a) determining a target nucleotide to be deaminated; (b) configuring the first fusion protein to bind proximally to the target nucleotide; (c) configuring a second fusion protein to bind proximally to a nucleotide opposite to the target nucleotide; and (d) administering an effective amount of the first and second fusion proteins, wherein, the first mitoTALE binds proximally to the target nucleotide and the second mitoTALE binds proximally to the nucleotide opposite the target nucleotide, and wherein the first portion of a DddA dimerizes with the second portion of a DddA, wherein the dimer has at least some activity native to full length DddA, and wherein the activity deaminates the target nucleotide.

[0057] In some embodiments, the disorder treated by the methods described herein is a genetic disorder. In some embodiments, the genetic disorder is a mitochondrial genetic disorder. In some embodiments, the mitochondrial disorder is selected from: MELAS/Leigh syndrome and Leber's hereditary optic neuropathy. In some embodiments, the mitochondrial disorder is MELAS/Leigh syndrome. In some embodiments, the mitochondrial disorder is Leber's hereditary optic neuropathy.

[0058] In some embodiments, the subject treated by the methods described herein is a mammal. In some embodiments, the mammal is human.

[0059] In another aspect, the disclosure relates to a kit comprising the first and/or second fusion proteins as disclosed herein, the pair of fusion proteins as disclosed herein, the dimer as disclosed herein, the nucleic acids as disclosed herein, the vector as disclosed herein, the composition as disclosed herein, and/or the isolated cell as disclosed herein. The vector may be an AAV vector (e.g., AAV1, AAV2, AAV3, AAV4, AAV5, AAV6, AAV7, AAV8, AAV9, or other serotype), a lentivirus vector, and may include one or more promoters that regulate the expression of the nucleotide sequences encoding the pair of fusion proteins.

### BRIEF DESCRIPTION OF THE DRAWINGS

[0060] The following drawings form part of the present specification and are included to further demonstrate certain aspects of the present disclosure, which can be better understood by reference to one or more of these drawings in combination with the detailed description of specific embodiments presented herein.

[0061] All previously described cytidine deaminases, including those used in base editing, operate on single-stranded DNA and thus when used for genome editing require unwinding of double-stranded DNA by macromolecules such as CRISPR-Cas9 complexed with a guide RNA. The difficulty of delivering guide RNAs into the mitochondria has thus far precluded base editing in mitochondrial DNA (mtDNA). The ability of DddA and the DddA variants described herein to deaminate double-stranded DNA raises the possibility of RNA-free precision base editing, rather than simple elimination of targeted mtDNA copies following double-strand DNA breaks. Split-DddA halves were engineered that are non-toxic and inactive until brought together on target DNA by adjacently bound programmable DNA-binding proteins. Fusions of the split-DddA halves, TALE array proteins, and uracil glycosylase inhibitor resulted in RNA-free DddA-derived cytosine base editors (DdCBEs) that catalyze C⋅G-to-T⋅A conversions efficiently and with high DNA sequence specificity and product purity at targeted sites within mtDNA in human cells.

[0062] DddA-mediated base editing was used to model a disease-associated mtDNA mutation in human cell lines, resulting in changes in rates of respiration and oxidative phosphorylation. CRISPR-free, DddA-mediated base editing enables precision editing of mtDNA, with important basic science and biomedical implications.

[0063] FIG. 1A is a schematic representation of a naturally occurring interbacterial toxin discovered by the inventors and catalyzes unprecedented deamination of cytidines within double-stranded DNA as a substrate. The protein is referred to as a double-stranded DNA deaminase, which is referred to herein as a “DddA.” The inventors are believed to be the first to identify such a deaminase. However, in its naturally occurring form, the inventors discovered that DddA is toxic to cells. The inventors have conceived of the idea of using the DddA in the context of base editing to deaminate a nucleobase at a target edit site.

[0064] In the context of base editing, all previously described cytidine deaminases utilize single-stranded DNA as a substrate (e.g., the R-loop region of a Cas9-gRNA/dsDNA complex). Base editing in the context of mitochondrial DNA has not heretofore been possible due to the challenges of introducing and/or expressing the gRNA needed for a Cas9-based system into mitochondria. The inventors have recognized for the first time that the catalytic properties of DddA can be leveraged to conduct base editing directly on a double strand DNA substrate by separating the DddA into inactive portions, which when co-localized within a cell will become reconstituted as an active DddA. This avoids or at least minimizes the toxicity associated with delivering and/or expressing a fully active DddA in a cell. For example, a DddA may be divided into two fragments at a “split site,” i.e., a peptide bond between two adjacent residues in the primary structure or sequence of a DddA. The split site may be positioned anywhere along the length of the DddA amino acid sequence, so long as the resulting fragments do not on their own possess a toxic property (which could be a complete or partial deaminase activity). In certain embodiments, the split site is located in a loop region of the DddA protein. In the embodiment shown in FIG. 1A, the arrows depict five possible split sites approximately equally spaced along the length of the DddA protein. The depicted embodiment further shows that the DddA was divided into two fragments at a split site located approximately in the middle of the DddA amino acid sequence. The DddA fragment lying to the left of the split site may be referred to as the “N-terminal DddA half” and the DddA fragment lying to the right of the split site may be referred to as the “C-terminal DddA half.” FIG. 1A identifies these fragments as “DddA half^{A}” and DddA half^{B}”, respectively. Depending on the location of the split site, the N-terminal DddA half and the C-terminal DddA half could be the same size, approximately the same size, or very different sizes.

[0065] FIG. 1B depicts a pair of Evolved DddA-containing base editors each comprising a pDNAbp (pDNAbp A and pDNAbp B) fused to an inactive fragment of DddA (DddA half^{A} and DddA half^{B}). The pDNAbp components bind to their cognate target sites (target site A and target site B) on the mtDNA, thereby localizing the inactive DddA fragments at the target edit/deamination site. Once localized, the DddA activity is restored. It should be noted, that while the pDNAbpA is shown binding to a target site which is physically arranged on the same side of the deamination site as the DddA half^{A}, the DddA half^{A} may be physically arranged so that it approaches the deamination site (e.g., for reconstitution) from any side (e.g., same side, top, opposite side, bottom, or any other angle to the deamination site (e.g., off-axis)) such that it may reconstitute with its DddA half^{B}. Additionally, while the figure shows the pDNAbpA and pDNAbpB binding to target sites on opposite sides of the deamination site, it can be readily envisioned that in view of the aforementioned description regarding orientation, that the two pDNAbp (e.g., A and B) may bind on the same side of the deamination site or opposite sides, provided that the DddA halves may reconstitute and effect deamination at the deamination site. Moreover, while the figure shows the pDNAbpA and pDNAbpB binding to target sites on opposite strands of the DNA duplex, it can be readily envisioned that in view of the aforementioned description regarding orientation, that the two pDNAbp (e.g., A and B) may bind on the same strand of the DNA duplex or opposite strands, provided that the DddA halves may reconstitute and effect deamination at the deamination site. Using these premises, it can readily be envisioned that in some embodiments, the DddA halves are oriented in any position relative to the deamination site such that they effectuate deamination, and further that the pDNAbp to which they are linked may be on the same side or different side of the deamination site, and in some embodiments, such pDNAbp of each of the DddA halves are on the same side of the deamination site, on different sides of the deamination site, are on the same strand of the DNA duplex, or on different strands of the DNA duplex.

[0066] FIG. 1C depicts a pair of Evolved DddA-containing base editors each comprising a mitoTALE (mitoTALE A and mitoTALE B) fused to an inactive fragment of DddA (DddA half^{A} and DddA half^{B}). The mitoTALE components bind to their cognate target sites (target site A and target site B) on the mtDNA, thereby localizing the inactive DddA fragments at the target edit/deamination site. Once localized, the DddA activity is restored. It should be noted, that while the mitoTALEA is shown binding to a target site which is physically arranged on the same side of the deamination site as the DddA half^{A}, the DddA half^{A} may be physically arranged so that it approaches the deamination site (e.g., for reconstitution) from any side (e.g., same side, top, opposite side, bottom, or any other angle to the deamination site (e.g., off-axis)) such that it may reconstitute with its DddA half^{B}. Additionally, while the figure shows the mitoTALEA and mitoTALEB binding to target sites on opposite sides of the deamination site, it can be readily envisioned that in view of the aforementioned description regarding orientation, that the two mitoTALE (e.g., A and B) may bind on the same side of the deamination site or opposite sides, provided that the DddA halves may reconstitute and effect deamination at the deamination site. Moreover, while the figure shows the mitoTALEA and mitoTALEB binding to target sites on opposite strands of the DNA duplex, it can be readily envisioned that in view of the aforementioned description regarding orientation, that the two mitoTALE (e.g., A and B) may bind on the same strand of the DNA duplex or opposite strands, provided that the DddA halves may reconstitute and effect deamination at the deamination site. Using these premises, it can readily be envisioned that in some embodiments, the DddA halves are oriented in any position relative to the deamination site such that they effectuate deamination, and further that the mitoTALE to which they are linked may be on the same side or different side of the deamination site, and in some embodiments, such mitoTALE of each of the DddA halves are on the same side of the deamination site, on different sides of the deamination site, are on the same strand of the DNA duplex, or are on different strands of the DNA duplex.

[0067] FIG. 1D depicts a pair of Evolved DddA-containing base editors each comprising a mitoZFP (mitoZFP A and mitoZFP B) fused to an inactive fragment of DddA (DddA half^{A} and DddA half^{B}). The mitoZFP components bind to their cognate target sites (target site A and target site B) on the mtDNA, thereby localizing the inactive DddA fragments at the target edit/deamination site. Once localized, the DddA activity is restored. It should be noted, that while the ZFPA is shown binding to a target site which is physically arranged on the same side of the deamination site as the DddA half^{A}, the DddA half^{A} may be physically arranged so that it approaches the deamination site (e.g., for reconstitution) from any side (e.g., same side, top, opposite side, bottom, or any other angle to the deamination site (e.g., off-axis)) such that it may reconstitute with its DddA half^{B}. Additionally, while the figure shows the ZFPA and ZFPB binding to target sites on opposite sides of the deamination site, it can be readily envisioned that in view of the aforementioned description regarding orientation, that the two ZFP (e.g., A and B) may bind on the same side of the deamination site or opposite sides, provided that the DddA halves may reconstitute and effect deamination at the deamination site. Moreover, while the figure shows the ZFPA and ZFPB binding to target sites on opposite strands of the DNA duplex, it can be readily envisioned that in view of the aforementioned description regarding orientation, that the two ZFP (e.g., A and B) may bind on the same strand of the DNA duplex or opposite strands, provided that the DddA halves may reconstitute and effect deamination at the deamination site. Using these premises, it can readily be envisioned that in some embodiments, the DddA halves are oriented in any position relative to the deamination site such that they effectuate deamination, and further that the ZFP to which they are linked may be on the same side or different side of the deamination site, and in some embodiments, such ZFP of each of the DddA halves are on the same side of the deamination site, on different sides of the deamination site, are on the same strand of the DNA duplex, or are on different strands of the DNA duplex.

[0068] FIG. 1E depicts a pair of Evolved DddA-containing base editors each comprising a Cas9 (Cas9 A and Cas9 B) fused to an inactive fragment of DddA (DddA half^{A} and DddA half^{B}). The Cas9 components bind to their cognate target sites (target site A and target site B) on the mtDNA as programmed by their respective guide RNAs, thereby localizing the inactive DddA fragments at the target edit/deamination site. Once localized, the DddA activity is restored. It should be noted, that while the Cas9A is shown binding to a target site which is physically arranged on the same side of the deamination site as the DddA half^{A}, the DddA half^{A} may be physically arranged so that it approaches the deamination site (e.g., for reconstitution) from any side (e.g., same side, top, opposite side, bottom, or any other angle to the deamination site (e.g., off-axis)) such that it may reconstitute with its DddA half^{B}. Additionally, while the figure shows the Cas9A and Cas9B binding to target sites on opposite sides of the deamination site, it can be readily envisioned that in view of the aforementioned description regarding orientation, that the two Cas9 (e.g., A and B) may bind on the same side of the deamination site or opposite sides, provided that the DddA halves may reconstitute and effect deamination at the deamination site. Moreover, while the figure shows the Cas9A and Cas9B binding to target sites on opposite strands of the DNA duplex, it can be readily envisioned that in view of the aforementioned description regarding orientation, that the two Cas9 (e.g., A and B) may bind on the same strand of the DNA duplex or opposite strands, provided that the DddA halves may reconstitute and effect deamination at the deamination site. Using these premises, it can readily be envisioned that in some embodiments, the DddA halves are oriented in any position relative to the deamination site such that they effectuate deamination, and further that the Cas9 to which they are linked may be on the same side or different side of the deamination site, and in some embodiments, such Cas9 of each of the DddA halves are on the same side of the deamination site, on different sides of the deamination site, are on the same strand of the DNA duplex, or are on different strands of the DNA duplex.

[0069] FIGS. 1F-1I. depicts a variety of architectural embodiments envisioned for the constructs described in any of FIGS. 1A to 1E. These architectural embodiments are not intended to limit the present disclosure as other architectures are also feasible and are contemplated by this disclosure. Embodiment (a) depicts a first fusion protein comprising a pDNAbp (arbitrarily labeled pDNAbp A) fused to a DddA half domain (arbitrarily labeled DddA half A) which binds to a first target site on a strand of a double-stranded DNA molecule (e.g., a miDNA). The first target site is arbitrarily labeled “target site A.” This embodiment also depicts a second fusion protein comprising a second pDNAbp (i.e., pDNAbp B) fused through a linker to a second DddA half (i.e., DddA half B). The second fusion protein is shown binding to a second target site on the opposite strand of DNA as the first target site. The DddA half A and DddA half B associate at the deamination site (“*”) to form a functional DddA which then proceeds to deaminate the deamination site. As illustrated by architectural embodiments in (a) through (e), the target sites are located on opposite strands of the DNA, with the pDNAbps binding to opposite strands. Embodiments (f) through (k), however, show that the target sites may be located on the same strand, with the pDNAbps binding to the same strands. In some embodiments, such as in (f) through (i), the target sites to which the pDNAbps bind are located on the same strand containing the target deamination site (“*”). In other embodiments, as depicted in (i) through (k), the target sites to which the pDNAbps bind are located on the strand opposite the strand containing the target deamination site (“*”). In addition, the fusion proteins can be arranged in any suitable linear order of domains, including N-[dDNAbp]-[linker]-[DddA half]-C and N-[DddA half]-[linker]-[dDNAbp]-C. Still further, the fusion proteins may be configured such that the DddA halves (e.g., DddA half A and DddA half B) associate near or adjacent the deamination target site, such as in same-side association near the deamination site in (d) or (f), or opposite-side association opposite the deamination site in (e) and (i), or combinations of these configurations, as in (a), (b), (c), (g), (h), (j), (k), or (l) through (q). In addition, the linker may fuse the Evolved DddA domain to either side of the pDNAbp, as shown in the variations of (l) through (q), or combinations of these embodiments. In addition, the DddA halves may associate with one another on either side of the target deamination site (e.g., compare embodiment (r) versus any of the embodiments of (a) through (q). The disclosure is not limited to the embodiments depicted.

[0070] FIG. 2 is a schematic showing the selection circuit in PANCE or PACE for evolving split DddA towards higher activity at TC context. DdCBE is encoded in M13 bacteriophage. Plasmid P3 is in the E. coli host cell and encodes for T7 RNA polymerase (T7 RNAP) fused to a degron. TALE-3 and TALE-4 target DNA sequences flanking a linker region within the T7 RNAP-degron fusion. Successful base editing at the linker sequence introduces a stop to remove the degron from T7 RNAP during translation. T7 RNAP is restored and binds to the T7 promoter on Plasmid P4 to drive gIII. Since gIII is required for phage infectivity, phages containing active DdCBEs will propagate and overtime.

[0071] FIGS. 3A-3D show editing activity of DdCBE mutants in mammalian HEK293T cells. FIG. 3A shows DdCBE protein architecture used to test mutant activity. FIGS. 3B-3C show editing efficiencies of DdCBEs targeting MT-ATP8, MT-ND5.2 and MT-ND4 3-days post transfection.

[0072] FIG. 3D shows indel percentages associated with DdCBE editing.

[0073] FIG. 4 is a chart showing the mutations of DddA variants. RIII and II were evolved on 5′-TCC. CC variants were evolved on 5′-CCC. GC variants were evolved on 5′-GCC.

[0074] FIGS. 5A-5B show DddA mutations after PACE. The T1380I mutation was obtained from earlier rounds of optimization and was incorporated into input phage for final PACE. Mutations E1396K and T1413I were obtained along the DddA-split interface.

[0075] FIGS. 6A-6B show that selected DddA mutants improve TC editing efficiency.

[0076] FIGS. 7A-7C show that RII DddA mutants improve editing at multiple mtDNA sites.

[0077] FIGS. 8A-8C show that RII mutants are compatible with G1333 split.

[0078] FIG. 9 shows a reversion analysis of DddA mutants for improved activity at TC. RIII and III variants, that showed consistent improvement in DddA activity at TC across multiple sites, are boxed.

[0079] FIGS. 10A-10B show that PACE selection circuit expands DddA targeting scope.

[0080] FIGS. 11A-11B show PACE mutations of DddA variants evolved against CCC and GCC.

[0081] FIG. 12 shows DdCBE library to profile context preference.

[0082] FIG. 13 shows that CC mutants are active at HCN contexts.

[0083] FIG. 14 shows that GC mutants are active at HCN and inactive at GCN contexts.

[0084] FIG. 15 shows a summary of bacteria profiling assay. Results show that CC-3 is the most active mutant at 5′-CC.

[0085] FIG. 16 shows mtDNA-ATP8 editing in HEK293T. Results show that GC-3 is the most active mutant at HCN contexts.

[0086] FIG. 17 shows mtDNA-ND5.2 editing in HEK293T. Results show that GC-3 is the most active mutant at HCN contexts.

[0087] FIG. 18 shows the suggested mutants for biochemical characterization. RIII and III show higher TC activity. GC-3 and CC-2 show higher CC activity.

[0088] FIGS. 19A-19C show phage-assisted evolution of DddA-derived cytosine base editor for improved activity and expanded targeting scope. FIG. 19A shows the selection to evolve DdCBE using PANCE and PACE. An accessory plasmid (AP, purple) contains gene III driven by the T7 promoter. The complementary plasmid (CP, orange) expresses a T7 RNAP-degron fusion. The evolving T7-DdCBE containing DddA split at G1397 is encoded in the selection phage (SP, blue). MP6, mutagenesis plasmid. Where relevant, the promoters are indicated. FIG. 19B shows a 2-amino-acid linker connects T7 RNAP to the degron. The linker sequence contains cytidines C₆ and C₇ that are targets for DdCBE editing. The nucleotide at position 8 can be varied to T, A, C or G to form plasmids CP-TCC, CP-ACC, CP-CCC and CP-GCC, respectively. In the absence of target C-to-T editing, expression of degron (brown) results in proteolysis of T7 RNAP (orange) and inhibition of gIII expression. Active T7-DdCBE edits one or both target cytidines to install a stop codon (*) within the linker, thus restoring active T7 RNAP to mediate gIII expression. FIG. 19C shows the architecture of T7-DdCBE and the 15-bp target spacing region. Nucleotides corresponding to DNA sequences within T7 RNAP, linker and degron genes are colored in orange, gray and brown, respectively.

[0089] FIGS. 20A-20F show evolved DddA variants improve mitochondrial base editing activity at 5′-TC. FIG. 20A shows mutations within the DddA gene of T7-DdCBE. Variants were isolated after evolution of canonical T7-DdCBE using PANCE and PACE in strain 4 transformed with MP6 (see FIG. 23A). DddA6 was rationally designed by incorporating the T1413I mutation into DddA5. FIG. 20B shows the crystal structure of DddA (grey, PDB 6U08) complexed with DddI immunity protein (not shown). Positions of mutations enriched after PANCE and PACE are colored in orange. The catalytic residue E1347 is shown. DddA was split at G1397 (red) to generate T7-DdCBE. FIGS. 20C-20D show mitochondrial DNA editing efficiencies and indel frequencies of HEK293T cells treated with (FIG. 20C) ND5.2-DdCBE or (FIG. 20D) ATP8-DdCBE. The genotypes of DddA variants correspond to FIG. 20A. For each base editor, the DNA spacing region, target cytosines and DddA split orientation are shown. FIG. 20E shows Frequencies of MT-ND5 alleles produced by DddA6 in FIG. 20C. FIG. 20F shows Frequencies of MT-ATP8 alleles produced by DddA6 in FIG. 20D. For FIGS. 20C-20F, values and errors reflect the mean±s.d. of n=3 independent biological replicates.

[0090] FIGS. 21A-21F show evolved DddA variants show enhanced editing at TC and non-TC target sequences in mitochondrial and nuclear DNA. FIG. 21A shows a bacterial assay to profile sequence preferences of evolved DddA variants. E. coli host cells expressing both halves of canonical or evolved T7-DdCBE were electroporated with a 16-membered library of NC₇N target plasmids for base editing. Target plasmids were isolated after overnight incubation for high-throughput sequencing of the spacing region (pink highlight). FIG. 21B shows a heat map showing C⋅G-to-T⋅A editing efficiencies of NC₇N sequence in each target plasmid. Target cytosines in all 16 possible NC₇N sequences, including the second cytosine in NCC₆ sequences, are colored in purple. Genotypes of listed variants correspond to FIG. 20A and FIG. 21C. Mock-treated cells did not express T7-DdCBE and contained only the library of target plasmids. Shading levels reflect the mean of n=3 independent biological replicates. FIG. 21C shows genotypes of DddA variants after evolving T7-DdCBE-DddA1 using context-specific PANCE and PACE. Mutations enriched for activity on a CCC linker or GCC linker are highlighted in red and blue, respectively. FIGS. 21D-21E show mitochondrial C⋅G-to-T⋅A editing efficiencies of HEK293T cells treated with canonical and evolved variants of (FIG. 21D) ND5.2-DdCBE or (FIG. 21E) ATP8-DdCBE. Target spacing regions and split DddA orientations are shown for each base editor. Cytosines highlighted in light purple and dark purple are in non-TC contexts. FIG. 21F shows the approximate editing windows for canonical (purple), DddA6 (red) and DddA11 (blue) variants of T7-DdCBE containing the G1397 split. The length of each colored line reflects the approximate relative editing efficiency for each DddA variant. FIGS. 21G-21H show nuclear DNA editing efficiencies of HEK293T cells treated with the canonical or DddA11 variant of (FIG. 21G) SIRT6-DdCBE or (FIG. 21H) JAK2-DdCBE. Target spacing regions and split DddA orientations are shown for each base editor. Cytosines highlighted in yellow, red, or blue are in AC, CC̅, or GC̅ contexts, respectively. The architecture of each nuclear DdCBE half is bpNLS-2×UGI-4-amino-acid linker-TALE-[DddA half]. bpNLS, bipartite nuclear localization signal. FIG. 21I shows the average percentage of genome-wide C⋅G-to-T⋅A off-target editing in mtDNA for indicated DdCBE and controls in HEK293T cells. For FIGS. 21D-21E and FIGS. 21G-21I, values and error bars reflect the mean±s.d of n=3 independent biological replicates.

[0091] FIGS. 22A-22F show the application of DddA11 variant to install pathogenic mutations at non-TC targets in HEK293T cells. FIG. 22A shows the use of DdCBEs to install disease-associated target mutations in human mtDNA. (V, valine; I, isoleucine; A, alanine; T, threonine; Q, glutamine; *, stop). FIGS. 22B-22D show mitochondrial base editing efficiencies of HEK293T cells treated with canonical or evolved (FIG. 22B) ND4.3-DdCBE, (FIG. 22C) ND4.2-DdCBE and (FIG. 22D) ND5.4-DdCBE. On-target cytosines are colored green, blue, or red, respectively. Cells expressing the DddA11 variant of DdCBE were isolated by fluorescence-activated cell sorting for high-throughput sequencing. The split orientation, target spacing region, and corresponding encoded amino acids are shown. Nucleotide sequences boxed in dotted lines are part of the TALE-binding site. FIGS. 22E-22F show oxygen consumption rate (OCR) (FIG. 22E) and relative values of respiratory parameters (FIG. 22F) in sorted HEK293T cells treated with the DddA11 variant of ND4.2-DdCBE or ND5.4-DdCBE. For FIGS. 22B-22F, values and error bars reflect the mean±s.d of n=3 independent biological replicates, except ND4.2-DdCBE in FIG. 22E and FIG. 22F reflect n=2 independent biological replicates. *P<0.05; **P<0.01, ***P<0.001 by Student's unpaired two-tailed t-test.

[0092] FIGS. 23A-23D show the evolution of canonical T7-DdCBE for improved TC activity using PANCE. FIG. 23A shows strains for screening selection stringency. Strains were generated by transformation with a variant of an AP and a variant of a CP. All CPs encode a TCC linker. Relative RBS strengths of SD8, sd8, sd2 and sd4U are 1.0, 0.20, 0.010 and 0.00040, respectively. FIG. 23B shows overnight phage propagation of indicated SPs in host strains with increasing stringencies. Dead T7-DdCBE phage contained the catalytically inactivating E1347A mutation in DddA. The fold phage propagation is the output phage titer divided by the input titer. FIG. 23C shows phage passage schedule for canonical T7-DdCBE evolution in PANCE using strain 4 transformed with MP6. Table indicates the dilution factor for the input phage population. Output phage titers for each replicate (A, B, C and D) are shown for each passage. Average fold propagation was obtained by averaging the fold propagation obtained from the four replicates A-D. FIG. 23D shows mitochondrial base editing efficiencies of HEK293T cells treated with canonical DdCBE or with DdCBEs containing the indicated mutations within DddA. For each base editor, the DddA split orientation and target cytosine (purple) within the spacing region is indicated. For FIG. 23B and FIG. 23D values and error bars reflect the mean±s.d of n=3 independent biological replicates.

[0093] FIGS. 24A-24D show DddA6 is compatible with split-G1333 and split-G1397 DdCBE orientations. Mitochondrial base editing efficiencies of HEK293T cells treated with (FIG. 24A) ND1.1-DdCBE, (FIG. 24B) ND1.2-DdCBE, (FIG. 24C) ND2-DdCBE and (FIG. 24D) ND4-DdCBE. Target spacing regions and split DddA orientations are shown above each plot. Values and error bars reflect the mean±s.d of n=3 independent biological replicates.

[0094] FIGS. 25A-25E show the evolution of DddA1-containing T7-DdCBE for expanded targeting scope using PANCE. FIG. 25A shows strains for overnight phage propagation assays on non-TC linker substrates. FIG. 25B shows overnight fold propagation of indicated SP in host strains encoding TC or non-TC linkers. Strains correspond to FIG. 25A. T7-DdCBE-DddA1 phage harbors a T1380I mutation in DddA. Dead T7-DdCBE-DddA1 phage contains an additional catalytically inactivating E1347A mutation in DddA. Values and error bars reflect the mean±s.d of n=3 independent biological replicates. FIGS. 25C-25E show phage passage schedule for T7-DdCBE-DddA1 evolution in PANCE using (FIG. 25C) strain 5 transformed with MP6, (FIG. 25D) strain 6 transformed with MP6 or (FIG. 25E) strain 7 transformed with MP6. Tables indicate the dilution factor for the input phage population. To initiate drift, phage from the previous passage was diluted 2 to 5-fold by mixing with log-phase cells containing pJC175e-DddI (see Example 2, Methods) and MP6. Phage was isolated after drifting for ˜8 h and mixed with the respective selection host strain for activity-dependent overnight phage propagation. For a given linker target, the output phage titers for each replicate (A, B, C and D) are shown for each passage. Average fold propagations above the dotted line in each graph represent propagation >1-fold. Average fold propagation was obtained by averaging the fold propagation obtained from the four replicates.

[0095] FIGS. 26A-26D show allele compositions from mitochondrial and nuclear editing by DddA11-containing DdCBEs. FIG. 26A shows frequencies of mitochondrial MT-ND5 alleles produced by DddA11 variant of ND5.2-DdCBE. FIG. 26B shows frequencies of mitochondrial MT-ATP8 alleles produced by DddA11 variant of ATP8-DdCBE. FIG. 26C shows frequencies of nuclear SIRT6 alleles produced by DddA11 variant of SIRT6-DdCBE. FIG. 26D shows frequencies of nuclear JAK2 alleles produced by DddA11 variant of JAK2-DdCBE. Values and errors reflect the mean±s.d of n=3 independent biological replicates.

[0096] FIGS. 27A-27C show evolved DddA variants mediate mitochondrial base editing in multiple human cell lines. Mitochondrial DNA editing efficiencies of canonical and evolved ND5.2-DdCBE in (FIG. 27A) HeLa cells, (FIG. 27B) K562 cells, and (FIG. 27C) U2OS cells. Editing efficiencies were measured for unsorted cells (bulk) and isolated DdCBE-expressing cells (sorted). Target spacing region and split DddA orientation are shown. Cytosines highlighted in light purple and dark purple are in non-TC contexts. Values and error bars reflect the mean±s.d of n=3 independent biological replicates.

[0097] FIG. 28 shows reversion analysis of DddA11. Mitochondrial base editing efficiencies of reversion mutants from ATP8-DdCBE-DddA11 (labelled as 11) in HEK293T cells. Reversion mutants are designated 11a-11h. Amino acids that differ from those in canonical ATP8-DdCBE are indicated, so the absence of an amino acid indicates a reversion to the corresponding canonical amino acid in the first column. Values and error bars reflect the mean±s.d of n=3 independent biological replicates.

[0098] FIGS. 29A-29H show editing windows of canonical and evolved T7-DdCBE. FIG. 29A shows target spacing region recognized by T7-DdCBE. Each spacing region contains TC repeats within the top strand (left, solid line) or bottom strand (right, dashed line). Lengths of spacing regions ranged from 12-18-bp. FIGS. 29B-29H show editing efficiencies mediated by canonical DdCBE (purple), DddA6-containing DdCBE (red) and DddA11-containing DdCBE (blue) are shown for each cytosine positioned within the spacing region length of (FIG. 29B) 12-bp, (FIG. 29C) 13-bp, (FIG. 29D) 14-bp, (FIG. 29E) 15-bp, (FIG. 29F) 16-bp, (FIG. 29G) 17-bp and (FIG. 29H) 18-bp. Subscripted numbers refer to the positions of cytosines in the spacing region, counting the DNA nucleotide immediately after the binding site of TALE3 as position 1. Editing efficiencies associated with the top and bottom strand are shown as solid and dashed lines, respectively. Mock-treated cells contained only the library of target plasmids (grey). For FIGS. 29B-29H, values and error bars reflect the mean±s.d of n=3 independent biological replicates

[0099] FIGS. 30A-30B show editing efficiencies at predicted nuclear off-target sites for nuclear-targeting DdCBEs. Average frequencies of all possible C⋅G-to-T⋅A conversions within a predicted off-target spacing region associated with (FIG. 30A) SIRT6-DdCBE and (FIG. 30B) JAK2-DdCBE. Values and error bars reflect the mean±s.d of n=3 independent biological replicates. See Table 9 for ranking of predicted off-target sites and Table 7 for off-target site amplicons.

[0100] FIGS. 31A-31D show the evolution of T7-DdCBE-DddA11 using PANCE for improved GC activity. FIG. 31A shows the sequence encoding the T7 RNAP-degron linker was modified to contain GCA or GCG in an effort to evolve for higher activity on GC targets. T7-DdCBE must convert GC₈ to GT₈ to install a stop codon in the linker sequence and restore T7 RNAP activity. FIG. 31B shows strains for overnight phage propagation assays on GCA or GCG linkers. FIG. 31C shows overnight fold propagation of indicated SP in host strains encoding GCA or GCG linkers. Strains correspond to FIG. 31B. T7-DdCBE-DddA11 phage contains the mutations S1330I, A1341V, N1342S, E1370K, T1380I and T1413I in DddA. Dead T7-DdCBE-DddA11 phage contains an additional inactivating E1347A mutation in DddA. Values and error bars reflect the mean±s.d of n=3 independent biological replicates. FIG. 31D shows the phage passage schedule for T7-DdCBE-DddA11 evolution in PANCE using strain 9 transformed with MP6 (red) or strain 10 transformed with MP6 (blue). The table indicates the dilution factor for the input phage population. To initiate drift, phage from the previous passage was diluted 2-fold by mixing with log-phase cells containing pJC175e-DddI (see Example 2, Methods) and MP6. Phage were isolated after drifting for ˜8 h and mixed with the respective selection host strain for activity-dependent overnight phage propagation. Output phage titer and fold propagation are shown for a single replicate. Fold propagations above the dotted line in each graph represent propagation >1-fold.

[0101] FIGS. 32A-32E show mitochondrial editing efficiencies of DdCBE variants evolved from GC-specific PANCE. FIG. 32A shows enriched mutations within the DddA gene of T7-DdCBE after PANCE against a GCA or GCG linker. T7-DdCBE-DddA11 was used as the input SP for PANCE. DddA mutations in the input SP are shown in beige. Mutations enriched after 9 or 12 PANCE passages are shown in blue. FIGS. 32B-32E show heat maps of mitochondrial base editing efficiencies of HEK293T cells treated with canonical and evolved variants of (FIG. 32B) ND4.3-DdCBE, (FIG. 32C) ND5.4-DdCBE (FIG. 32D) ND5.2-DdCBE and (FIG. 32E) ATP8-DdCBE. Target spacing regions and split DddA orientations are shown for each base editor. For FIGS. 32B-32E, colors reflect the mean of n=3 independent biological replicates.

[0102] FIGS. 33A-33G show mitochondrial genome-wide off-target C⋅G-to-T⋅A mutations. FIGS. 33A-33F show the average frequency and mitochondrial genome position of each unique C⋅G-to-T⋅A single nucleotide variant (SNV) is shown for HEK293T cells treated with (FIG. 33A) canonical ATP8-DdCBE, (FIG. 33B) ATP8-DdCBE containing DddA6, (FIG. 33C) ATP8-DdCBE containing DddA11, (FIG. 33D) canonical ND5.2-DdCBE, (FIG. 33E) ND5.2-DdCBE containing DddA6 and (FIG. 33F) ND5.2-DdCBE containing DddA11. FIG. 33G shows the ratio of average on-target:off-target editing for the indicated canonical and evolved DdCBE. The ratio was calculated for each treatment condition as: (average frequency of all on-target C⋅G base pairs)+(average frequency of non-target C⋅G base pairs present in the mitochondrial genome).

[0103] FIGS. 34A-34C show allele compositions at disease-relevant mtDNA sites in HEK293T cells following base editing by DddA11-containing DdCBE variants. Allele frequency table of HEK293T cells treated with DddA11-containing (FIG. 34A) ND4.3-DdCBE, (FIG. 34B) ND4.2-DdCBE and (FIG. 34C) ND5.4-DdCBE to install the non-TC mutations m.11642G>A, m.11696>A and m.13297G>A, respectively. On-target cytosines are boxed. Values and errors reflect the mean±s.d of n=3 independent biological replicates.

[0104] FIGS. 35A-35B show the structural alignment of DddA with ssDNA-bound APOBEC3G. FIG. 35A shows the crystal structure of DddA (grey, PDB 6U08) complexed with DddI immunity protein (not shown). Positions of mutations common to the CCC- and GCC-specific evolutions are colored in purple. Additional mutations are colored according to FIG. 21C. DddA was split at G1397 (red) to generate T7-DdCBE for PANCE and PACE. FIG. 35B shows DddA (PDB 6UO8, grey) was aligned to the catalytic domain of APOBEC3G (PDB 2KBO, red) complexed to its ssDNA 5′-CCA substrate (orange) using Pymol. The target C undergoing deamination by APOBEC3G is indicated as C₀. Reversion analysis on the DddA11 mutant indicated that A1341V, N1342S and E1370K are critical for expanding the targeting scope of DddA (see FIG. 28). D317 (red) confers 5′-CC specificity in APOBEC3G and loop 3 controls the catalytic activity of the APOBEC3G.

[0105] FIG. 36 shows a mutation table of variants from PANCE of canonical T7-DdCBE for improved TC activity. Strain 4 transformed with MP6 was infected with input SP encoding the canonical T7-DdCBE (see FIG. 23A). Four plaques from each replicate (A, B, C and D) were sequenced after 7 passages. Mutations are highlighted in blue. Genotypes in red were tested for mitochondrial base editing in human cells (see FIG. 23D).

[0106] FIGS. 37A-37B show mitochondrial editing efficiencies of DdCBEs containing a mismatched or non-mismatched terminal TALE repeat. The original right TALE in ND5.2-DdCBE contained an RVD in the terminal repeat that recognized a mismatched thymine instead of guanine, and the original left TALE in ATP8-DdCBE contained a mismatched RVD in the terminal repeat the recognized a mismatched thymine instead of cytosine⁵. To clarify the effect of a mismatched RVD on mitochondrial editing efficiencies, we compared the base editing activities between the DdCBE containing the mismatched RVD (labelled as T) and the variant containing the non-mismatched RVD, which is labelled as G for ND5.2-DdCBE (FIG. 37A) and C for ATP8-DdCBE (FIG. 37B). The editing efficiencies for mismatched DdCBEs containing DddA variants were generally comparable to or resulted in 2-10% higher average editing than the equivalent non-mismatched DdCBE (see FIG. 37A and FIG. 37B). Given that DdCBEs containing DddA6 or DddA11 resulted in similar editing efficiencies when tested as a mismatched TALE or non-mismatched TALE, all preceding figures, except for FIGS. 20C-20D and FIGS. 21D-21E, are produced from using DdCBEs containing the original mismatched RVD. Values and error bars reflect the mean±s.d of n=3 independent biological replicates

[0107] FIG. 38 shows a mutation table of variants from PACE of T7-DdCBE-DddA1 for improved TC activity. Strain 4 transformed with MP6 was infected with SP encoding T7-DdCBE-DddA1 (see FIG. 23A). Individual plaques were isolated at the end of PACE and sequenced for their DddA genes. Genotypes in red were tested for mitochondrial base editing in human cells.

[0108] FIG. 39 shows a mutation table of variants from PANCE of T7-DdCBE-DddA1 for expanded targeting scope. Strains 5, 6 or 7, which were each transformed with MP6, were used for PANCE-ACC, PANCE-CCC or PANCE-GCC, respectively (see FIG. 25A for strain identities). Each host strain was infected with input SP encoding T7-DdCBE-DddA1. Plaques from each replicate (A, B, C and D) were sequenced after 9 passages. Mutations are highlighted in blue. Phage lagoons highlighted in red were used as inputs for PACE.

[0109] FIG. 40 shows a mutation table of variants from the PACE evolution to expand targeting scope. Host strain 6 transformed with MP6 was infected with the phage population CCC-B from PANCE. Host strain 7 transformed with MP6 was infected either phage population GCC-A or GCC-D from, both of which were derived from PANCE (see FIG. 25A for strain identities). The consensus genotypes of input phage populations from PANCE are shown. Data was obtained by sequencing individual plaques isolated at the end of PACE. Genotypes in red were tested for base editing in mammalian cells. ^{†}T1413I was included in this genotype.

[0110] FIGS. 41A-41D show representative FACS gating plots for eGFP⁺/mCherry⁺ cells. FACs gating plots for eGFP⁺ and mCherry⁺ cell sorting to isolate HeLa cells (FIG. 41A), K562 cells (FIG. 41B), U20S cells (FIG. 41C) and HEK293T cells (FIG. 41D) expressing both halves of ND5.2-DdCBE. The image data was generated on a Sony LE-MA900 cytometer using Cell Sorter Software v. 3.0.5. Cells were initially gated on population using FSC-A/BSC-A (Gate A), then sorted for singlets using FSC-A/FSC-H (Singlet). Live cells were sorted for by gating mCherry-positive and eGFP-positive cells (Double positive). Single-color eGFP and mCherry controls were used for compensation.

[0111] FIGS. 42A-42B show nuclear editing efficiencies of DdCBEs containing N-terminal UGI fusions or C-terminal UGI fusions. It was previously reported that the N-terminal UGI fusion of a nuclear-targeting DdCBE resulted in more efficient nuclear base editing compared to a C-terminal UGI fusion⁶. The editing efficiencies of these two architectures were compared in SIRT6-DdCBE (FIG. 42A) and JAK2-DdCBE (FIG. 42B). Consistent with earlier observations, N-terminal UGI fusions generally yielded higher TC and non-TC editing efficiencies compared to C-terminal fusions, except for canonical JAK2-DdCBE. Values and error bars reflect the mean±s.d of n=3 independent biological replicates

[0112] FIG. 43 shows a mutation table of variants from the GC-specific PANCE. Strain 9 transformed with MP6 was used for PANCE-GCA. Strain 10 transformed with MP6 was used for PANCE-GCG (see FIG. 31B for strain identities). Each host strain was infected with input SP encoding the DddA11 variant of T7-DdCBE. Plaques were sequenced after nine and 12 passages. Mutations are highlighted in grey.

### DEFINITIONS

[0113] As used herein and in the claims, the singular forms “a,” “an,” and “the” include the singular and the plural reference unless the context clearly indicates otherwise. Thus, for example, a reference to “an agent” includes a single agent and a plurality of such agents.

### Base Editing

[0114] “Base editing” refers to genome editing technology that involves the conversion of a specific nucleic acid base into another at a targeted genomic locus (e.g., including in a mtDNA). In certain embodiments, this can be achieved without requiring double-stranded DNA breaks (DSB), or single stranded breaks (i.e., nicking). To date, other genome editing techniques, including CRISPR-based systems, begin with the introduction of a DSB at a locus of interest. Subsequently, cellular DNA repair enzymes mend the break, commonly resulting in random insertions or deletions (indels) of bases at the site of the DSB. However, when the introduction or correction of a point mutation at a target locus is desired rather than stochastic disruption of the entire gene, these genome editing techniques are unsuitable, as correction rates are low (e.g. typically 0.1% to 5%), with the major genome editing products being indels. In order to increase the efficiency of gene correction without simultaneously introducing random indels, the present inventors previously modified the CRISPR/Cas9 system to directly convert one DNA base into another without DSB formation. See, Komor, A. C., et al., Programmable editing of a target base in genomic DNA without double-stranded DNA cleavage. Nature 533, 420-424 (2016), the entire contents of which is incorporated by reference herein.

### Base Editor

[0115] The term “base editor (BE)” as used herein, refers to an agent comprising a polypeptide that is capable of making a modification to a base (e.g., A, T, C, G, or U) within a nucleic acid sequence (e.g., mtDNA) that converts one base to another (e.g., A to G, A to C, A to T, C to T, C to G, C to A, G to A, G to C, G to T, T to A, T to C, T to G). In some embodiments, the BE refers to those fusion proteins described herein which are capable of modifying bases directly in mtDNA. Such BEs can also be referred to herein as “evolved-DddA containing base editors” or “mtDNA BEs.”0 Such BEs can refer to those fusion proteins comprising a programmable DNA binding protein (“pDNAbp”) (e.g., a mitoTALE, mitoZFP, or a CRISPR/Cas9) and a double-stranded DNA deaminase (“DddA”) to precisely install nucleotide changes and/or correct pathogenic mutations in mtDNA, rather than destroying the mtDNA with double-strand breaks (DSBs). It should be noted that in some places DddA is referred to as DddE (e.g., FIG. 6 of the accompanying drawings). In these instances, DddE shall be interpreted to refer to DddA as a synonym.

[0116] In some embodiments, the base editors contemplated herein comprise a nuclease-inactive Cas9 (dCas9) fused to a deaminase which binds a nucleic acid in a guide RNA-programmed manner via the formation of an R-loop, but does not cleave the nucleic acid. For example, the dCas9 domain of the fusion protein may include a D10A and a H840A mutation (which renders Cas9 capable of cleaving only one strand of a nucleic acid duplex), as described in PCT/US2016/058344, which published as WO 2017/070632 on Apr. 27, 2017 and is incorporated herein by reference in its entirety. The DNA cleavage domain of S. pyogenes Cas9 includes two subdomains, the HNH nuclease subdomain and the RuvC1 subdomain. The HNH subdomain cleaves the strand complementary to the gRNA (the “targeted strand”, or the strand in which editing or deamination occurs), whereas the RuvC1 subdomain cleaves the non-complementary strand containing the PAM sequence (the “non-edited strand”). The RuvC1 mutant D10A generates a nick in the targeted strand, while the HNH mutant H840A generates a nick on the non-edited strand (see Jinek et al., Science, 337:816-821(2012); Qi et al., Cell. 28; 152(5):1173-83 (2013)).

[0117] BEs that convert a C to T, in some embodiments, comprise a cytidine deaminase (e.g., a double-stranded DNA deaminase or DddA). A “cytidine deaminase” (including those DddAs disclosed herein) refers to an enzyme that catalyzes the chemical reaction “cytosine+H₂O→uracil+NH₃” or “5-methyl-cytosine+H₂O→thymine+NH₃.” As it may be apparent from the reaction formula, such chemical reactions result in a C to U/T nucleobase change. In the context of a gene, such a nucleotide change, or mutation, may in turn lead to an amino acid change in the protein, which may affect the protein's function, e.g., loss-of-function or gain-of-function. In some embodiments, the C to T nucleobase editor comprises a dCas9 or nCas9 fused to a cytidine deaminase. In some embodiments, the cytidine deaminase domain is fused to the N-terminus of the dCas9 or nCas9.

[0118] In some embodiments, the nucleobase editor further comprises a domain that inhibits uracil glycosylase, and/or a nuclear localization signal.

[0119] Cas9 domains used in base editing have been described in the following references, the contents of which may be applied in the instant disclosure to modify and/or include in BEs described herein, which can target mtDNA, e.g., in Rees & Liu, Nat Rev Genet. 2018; 19(12):770-788 and Koblan et al., Nat Biotechnol. 2018; 36(9):843-846; as well as U.S. Patent Publication No. 2018/0073012, published Mar. 15, 2018, which issued as U.S. Pat. No. 10,113,163; on Oct. 30, 2018; U.S. Patent Publication No. 2017/0121693, published May 4, 2017, which issued as U.S. Pat. No. 10,167,457 on Jan. 1, 2019; International Publication No. WO 2017/070633, published Apr. 27, 2017; U.S. Patent Publication No. 2015/0166980, published Jun. 18, 2015; U.S. Pat. No. 9,840,699, issued Dec. 12, 2017; U.S. Pat. No. 10,077,453, issued Sep. 18, 2018; International Publication No. WO 2019/023680, published Jan. 31, 2019; International Publication No. WO 2018/0176009, published Sep. 27, 2018, International Application No PCT/US2019/033848, filed May 23, 2019, International Application No. PCT/US2019/47996, filed Aug. 23, 2019; International Application No. PCT/US2019/049793, filed Sep. 5, 2019; U.S. Provisional Application No. 62/835,490, filed Apr. 17, 2019; International Application No. PCT/US2019/61685, filed Nov. 15, 2019; International Application No. PCT/US2019/57956, filed Oct. 24, 2019; U.S. Provisional Application No. 62/858,958, filed Jun. 7, 2019; International Publication No. PCT/US2019/58678, filed Oct. 29, 2019, the contents of each of which are incorporated herein by reference in their entireties.

[0120] Exemplary adenine and cytosine base editors are also described in Rees & Liu, Base editing: precision chemistry on the genome and transcriptome of living cells, Nat. Rev. Genet. 2018; 19(12):770-788; as well as U.S. Patent Publication No. 2018/0073012, published Mar. 15, 2018, which issued as U.S. Pat. No. 10,113,163, on Oct. 30, 2018; U.S. Patent Publication No. 2017/0121693, published May 4, 2017, which issued as U.S. Pat. No. 10,167,457 on Jan. 1, 2019; International Publication No. WO 2017/070633, published Apr. 27, 2017; U.S. Patent Publication No. 2015/0166980, published Jun. 18, 2015; U.S. Pat. No. 9,840,699, issued Dec. 12, 2017; and U.S. Pat. No. 10,077,453, issued Sep. 18, 2018, PCT Application PCT/US2017/045381, filed Aug. 3, 2017, which published as WO 2018/027078, and PCT Application No. PCT/US2019/033848, which published as WO 2019/226953, each of which is herein incorporated by reference. Any of the deaminase components of these adenine or cytidine BEs could be modified using a method of directed evolution (e.g., PACE or PANCE) to obtain a deaminase which may use double-stranded DNA as a substrate, and thus, which could be used in the BEs described herein which are intended for use in conducting base editing directly on mtDNA, i.e., on a double-stranded DNA target.

### Cas9

[0121] The term “Cas9” or “Cas9 nuclease” refers to an RNA-guided nuclease comprising a Cas9 domain, or a fragment thereof (e.g., a protein comprising an active or inactive DNA cleavage domain of Cas9, and/or the gRNA binding domain of Cas9). A “Cas9 domain” as used herein, is a protein fragment comprising an active or inactive cleavage domain of Cas9 and/or the gRNA binding domain of Cas9. A “Cas9 protein” is a full length Cas9 protein. A Cas9 nuclease is also referred to sometimes as a casnI nuclease or a CRISPR (Clustered Regularly Interspaced Short Palindromic Repeat)-associated nuclease. CRISPR is an adaptive immune system that provides protection against mobile genetic elements (viruses, transposable elements, and conjugative plasmids). CRISPR clusters contain spacers, sequences complementary to antecedent mobile elements, and target invading nucleic acids. CRISPR clusters are transcribed and processed into CRISPR RNA (crRNA). In type II CRISPR systems correct processing of pre-crRNA requires a trans-encoded small RNA (tracrRNA), endogenous ribonuclease 3 (rnc) and a Cas9 domain. The tracrRNA serves as a guide for ribonuclease 3-aided processing of pre-crRNA. Subsequently, Cas9/crRNA/tracrRNA endonucleolytically cleaves linear or circular dsDNA target complementary to the spacer. The target strand not complementary to crRNA is first cut endonucleolytically, then trimmed 3′-5′ exonucleolytically. In nature, DNA-binding and cleavage typically requires protein and both RNAs. However, single guide RNAs (“sgRNA”, or simply “gNRA”) can be engineered so as to incorporate aspects of both the crRNA and tracrRNA into a single RNA species. See, e.g., Jinek M., Chylinski K., Fonfara I., Hauer M., Doudna J. A., Charpentier E. Science 337:816-821(2012), the entire contents of which are hereby incorporated by reference. Cas9 recognizes a short motif in the CRISPR repeat sequences (the PAM or protospacer adjacent motif) to help distinguish self versus non-self. Cas9 nuclease sequences and structures are well known to those of skill in the art (see, e.g., “Complete genome sequence of an M1 strain of Streptococcus pyogenes.” Ferretti et al., J. J., McShan W. M., Ajdic D. J., Savic D. J., Savic G., Lyon K., Primeaux C., Sezate S., Suvorov A. N., Kenton S., Lai H. S., Lin S. P., Qian Y., Jia H. G., Najar F. Z., Ren Q., Zhu H., Song L., White J., Yuan X., Clifton S. W., Roe B. A., McLaughlin R. E., Proc. Natl. Acad. Sci. U.S.A. 98:4658-4663(2001); “CRISPR RNA maturation by trans-encoded small RNA and host factor RNase III.” Deltcheva E., Chylinski K., Sharma C. M., Gonzales K., Chao Y., Pirzada Z. A., Eckert M. R., Vogel J., Charpentier E., Nature 471:602-607(2011); and “A programmable dual-RNA-guided DNA endonuclease in adaptive bacterial immunity.” Jinek M., Chylinski K., Fonfara I., Hauer M., Doudna J. A., Charpentier E. Science 337:816-821(2012), the entire contents of each of which are incorporated herein by reference). Cas9 orthologs have been described in various species, including, but not limited to, S. pyogenes and S. thermophilus. Additional suitable Cas9 nucleases and sequences will be apparent to those of skill in the art based on this disclosure, and such Cas9 nucleases and sequences include Cas9 sequences from the organisms and loci disclosed in Chylinski, Rhun, and Charpentier, “The tracrRNA and Cas9 families of type II CRISPR-Cas immunity systems” (2013) RNA Biology 10:5, 726-737; the entire contents of which are incorporated herein by reference. In some embodiments, a Cas9 nuclease comprises one or more mutations that partially impair or inactivate the DNA cleavage domain.

[0122] A nuclease-inactivated Cas9 domain may interchangeably be referred to as a “dCas9” protein (for nuclease-“dead” Cas9). Methods for generating a Cas9 domain (or a fragment thereof) having an inactive DNA cleavage domain are known (see, e.g., Jinek et al., Science. 337:816-821(2012); Qi et al., “Repurposing CRISPR as an RNA-Guided Platform for Sequence-Specific Control of Gene Expression” (2013) Cell. 28; 152(5):1173-83, the entire contents of each of which are incorporated herein by reference). For example, the DNA cleavage domain of Cas9 is known to include two subdomains, the HNH nuclease subdomain and the RuvC1 subdomain. The HNH subdomain cleaves the strand complementary to the gRNA, whereas the RuvC1 subdomain cleaves the non-complementary strand. Mutations within these subdomains can silence the nuclease activity of Cas9. For example, the mutations D10A and H840A completely inactivate the nuclease activity of S. pyogenes Cas9 (Jinek et al., Science. 337:816-821(2012); Qi et al., Cell. 28; 152(5):1173-83 (2013)). In some embodiments, proteins comprising fragments of Cas9 are provided. For example, in some embodiments, a protein comprises one of two Cas9 domains: (1) the gRNA binding domain of Cas9; or (2) the DNA cleavage domain of Cas9. In some embodiments, proteins comprising Cas9 or fragments thereof are referred to as “Cas9 variants.” A Cas9 variant shares homology to Cas9, or a fragment thereof. For example, a Cas9 variant is at least about 70% identical, at least about 80% identical, at least about 90% identical, at least about 95% identical, at least about 96% identical, at least about 97% identical, at least about 98% identical, at least about 99% identical, at least about 99.5% identical, at least about 99.8% identical, or at least about 99.9% identical to wild type Cas9 (e.g., SpCas9 of SEQ ID NO: 59). In some embodiments, the Cas9 variant may have 1, 2, 3, 4, 5, 6, 7, 8, 9, 10, 11, 12, 13, 14, 15, 16, 17, 18, 19, 20, 21, 22, 21, 24, 25, 26, 27, 28, 29, 30, 31, 32, 33, 34, 35, 36, 37, 38, 39, 40, 41, 42, 43, 44, 45, 46, 47, 48, 49, 50, or more amino acid changes compared to wild type Cas9 (e.g., SpCas9 of SEQ ID NO: 59). In some embodiments, the Cas9 variant comprises a fragment of Cas9 (e.g., a gRNA binding domain or a DNA-cleavage domain), such that the fragment is at least about 70% identical, at least about 80% identical, at least about 90% identical, at least about 95% identical, at least about 96% identical, at least about 97% identical, at least about 98% identical, at least about 99% identical, at least about 99.5% identical, or at least about 99.9% identical to the corresponding fragment of wild type Cas9 (e.g., SpCas9 of SEQ ID NO: 59). In some embodiments, the fragment is at least 30%, at least 35%, at least 40%, at least 45%, at least 50%, at least 55%, at least 60%, at least 65%, at least 70%, at least 75%, at least 80%, at least 85%, at least 90%, at least 95% identical, at least 96%, at least 97%, at least 98%, at least 99%, or at least 99.5% of the amino acid length of a corresponding wild type Cas9 (e.g., SpCas9 of SEQ ID NO: 59).

[0123] As used herein, the term “nCas9” or “Cas9 nickase” refers to a Cas9 or a variant thereof, which cleaves or nicks only one of the strands of a target cut site thereby introducing a nick in a double strand DNA molecule rather than creating a double strand break. This can be achieved by introducing appropriate mutations in a wild-type Cas9 which inactivates one of the two endonuclease activities of the Cas9. Any suitable mutation which inactivates one Cas9 endonuclease activity but leaves the other intact is contemplated, such as one of D10A or H840A mutations in the wild-type S. pyogenes Cas9 amino acid sequence, or a D10A mutation in the wild-type S. aureus Cas9 amino acid sequence, may be used to form the nCas9.

### Cytidine Deaminase

[0124] As used herein, a “cytidine deaminase” encoded by the CDA gene is an enzyme that catalyzes the removal of an amine group from cytidine (i.e., the base cytosine when attached to a ribose ring) to uridine (C to U) and deoxycytidine to deoxyuridine (C to U). A non-limiting example of a cytidine deaminase is APOBEC1 (“apolipoprotein B mRNA editing enzyme, catalytic polypeptide 1”). Another example is AID (“activation-induced cytidine deaminase”). Under standard Watson-Crick hydrogen bond pairing, a cytosine base hydrogen bonds to a guanine base. When cytidine is converted to uridine (or deoxycytidine is converted to deoxyuridine), the uridine (or the uracil base of uridine) undergoes hydrogen bond pairing with the base adenine. Thus, a conversion of “C” to uridine (“U”) by cytidine deaminase will cause the insertion of “A” instead of a “G” during cellular repair and/or replication processes. Since the adenine “A” pairs with thymine “T”, the cytidine deaminase in coordination with DNA replication causes the conversion of an C-G pairing to a T. A pairing in the double-stranded DNA molecule.

### Deaminase

[0125] The term “deaminase” or “deaminase domain” refers to a protein or enzyme that catalyzes a deamination reaction. In some embodiments, the deaminase is an adenosine (or adenine) deaminase, which catalyzes the hydrolytic deamination of adenine or adenosine. In some embodiments, the adenosine deaminase catalyzes the hydrolytic deamination of adenine or adenosine in deoxyribonucleic acid (DNA) to inosine. In other embodiments, the deaminase is a cytidine (or cytosine) deaminase, which catalyzes the hydrolytic deamination of cytidine or cytosine. In preferred aspects, the deaminase is a double-stranded DNA deaminase, or is modified, evolved, or otherwise altered to be able to utilize double-strand DNA as a substrate for deamination.

[0126] The deaminase embraces the DddA domains described herein, and defined below. The DddA is a type of deaminase, but where the activity of the deaminase is against double-stranded DNA, rather than single-stranded DNA, which is the case for deaminases prior to the present disclosure.

[0127] The deaminases provided herein may be from any organism, such as a bacterium. In some embodiments, the deaminase or deaminase domain is a variant of a naturally-occurring deaminase from an organism. In some embodiments, the deaminase or deaminase domain does not occur in nature. For example, in some embodiments, the deaminase or deaminase domain is at least 50%, at least 55%, at least 60%, at least 65%, at least 70%, at least 75% at least 80%, at least 85%, at least 90%, at least 95%, at least 96%, at least 97%, at least 98%, at least 99%, or at least 99.5% identical to a naturally-occurring deaminase.

### DNA Editing Efficiency

[0128] The term “DNA editing efficiency,” as used herein, refers to the number or proportion of intended base pairs that are edited. For example, if a base editor edits 10% of the base pairs that it is intended to target (e.g., within a cell or within a population of cells), then the base editor can be described as being 10% efficient. Some aspects of editing efficiency embrace the modification (e.g. deamination) of a specific nucleotide within DNA, without generating a large number or percentage of insertions or deletions (i.e., indels). It is generally accepted that editing while generating less than 5% indels (as measured over total target nucleotide substrates) is high editing efficiency. The generation of more than 20% indels is generally accepted as poor or low editing efficiency. Indel formation may be measured by techniques known in the art, including high-throughput screening of sequencing reads.

### DddA and DddA Variants (or Evolved DddAs)

[0129] The term “double-stranded DNA deaminase domain” or “DddA” (or equivalently, DddE) refers to a protein which catalyzes a deamination of a target nucleotide (e.g., C, A, G, C) in a double-stranded DNA molecule. Reference to DddA and double-stranded DNA deaminase are equivalent. In one embodiment, the DddA deaminates a cytidine. Deamination of cytidine, results in a uracil (or deoxyuracil in the case of deoxycytidine), and through replication and/or repair processes, converts the original C:G base pair to a T:A base pair. This change can also be referred to as a “C-to-T” edit because the C of the C:G pair is converted to a T of T:A pair. DddA, when expressed naturally, can be toxic to biological systems. While the mechanism of action is not clearly documented, one rationale for the observed toxicity is DddA's activity may cause indiscriminate deamination of cytidine in vivo on double-stranded target DNA (e.g., the cellular genome). Such indiscriminate deaminations may provoke cellular repair responses, including, but not limited to, degradation of genomic DNA. Herein described are variants of canonical DddA or “evolved DddA” variants or proteins. Canonical DddA was described in Mok et al., “A bacterial cytidine deaminase toxin enables CRISPR-free mitochondrial base editing,” Nature, 2020; 583(7817): 631-637 (“Mok et al., 2020”), (incorporated herein by reference). Canonical DddA was discovered in Burkholderia cenocepia and reported Mok et al. and in the Protein Data Bank as PDB ID: 6U08, which has the following full-length amino acid sequence (1427 amino acids):

>tr|A0A1V6L4E7|A0A1V6L4E7_9BURK YD repeat (Two copies) OS = Burkholderia
cenocepacia OX = 95486 GN = UE95_03830 PE = 1 SV = 1 (1427 AA the canonical
protein or “canonical DddA”)
(SEQ ID NO: 16)
MYEAARVTDPIDHTSALAGFLVGAVLGIALIAAVAFATFTCGFGVALLAGMMAGIGAQALLSIGESIG
KMFSSQSGNIITGSPDVYVNSLSAAYATLSGVACSKHNPIPLVAQGSTNIFINGRPAARKDDKITCGATI
GDGSHDTFFHGGTQTYLPVDDEVPPWLRTATDWAFTLAGLVGGLGGLLKASGGLSRAVLPCAAKFIG
GYVLGEAFGRYVAGPAINKAIGGLFGNPIDVTTGRKILLAESETDYVIPSPLPVAIKRFYSSGIDYAGTL
GRGWVLPWEIRLHARDGRLWYTDAQGRESGFPMLRAGQAAFSEADQRYLTRTPDGRYILHDLGERY
YDFGQYDPESGRIAWVRRVEDQAGQWYQFERDSRGRVTEILTCGGLRAVLDYETVFGRLGTVTLVH
EDERRLAVTYGYDENGQLASVTDANGAVVRQFAYTNGLMTSHMNALGFTSSYVWSKIEGEPRVVET
HTSEGENWTFEYDVAGRQTRVRHADGRTAHWRFDAQSQIVEYTDLDGAFYRIKYDAVGMPVMLML
PGDRTVMFEYDDAGRIIAETDPLGRTTRTRYDGNSLRPVEVVGPDGGAWRVEYDQQGRVVSNQDSL
GRENRYEYPKALTALPSAHIDALGGRKTLEWNSLGKLVGYTDCSGKTTRTSFDAFGRICSRENALGQR
ITYDVRPTGEPRRVTYPDGSSETFEYDAAGTLVRYIGLGGRVQELLRNARGQLIEAVDPAGRRVQYRY
DVEGRLRELQQDHARYTFTYSAGGRLLTETRPDGILRRFEYGEAGELLGLDIVGAPDPHATGNRSVRT
IRFERDRMGVLKVQRTPTEVTRYQHDKGDRLVKVERVPTPSGIALGIVPDAVEFEYDKGGRLVAEHG
SNGSVIYTLDELDNVVSLGLPHDQTLQMLRYGSGHVHQIRFGDQVVADFERDDLHREVSRTQGRLTQ
RSGYDPLGRKVWQSAGIDPEMLGRGSGQLWRNYGYDAAGDLIETSDSLRGSTRFSYDPAGRLISRAN
PLDRKFEEFAWDAAGNLLDDAQRKSRGYVEGNRLLMWQDLRFEYDPFGNLATKRRGANQTQRFTY
DGQDRLITVHTQDVRGVVETRFAYDPLGRRIAKTDTAFDLRGMKLRAETKRFVWEGLRLVQEVRET
GVSSYVYSPDAPYSPVARADTVMAEALAATVIDSAKRAARIFHFHTDPVGAPQEVTDEAGEVAWAG
QYAAWGKVEATNRGVTAARTDQPLRFAGQYADDSTGLHYNTFRFYDPDVGRFINQDPIGLNGGANV
YHYAPNPVGWVDPWGLAGSYALGPYQISAPQLPAYNGQTVGTFYYVNDAGGLESKVFSSGGPTPYP
NYANAGHVEGQSALFMRDNGISEGLVFHNNPEGTCGFCVNMTETLLPENAKMTVVPPEGAIPVKRGA
TGETKVFTGNSNSPKSPTKGGC.

[0130] As reported in Mok et al. 2020, amino acids 1264-1427 of DddA were identified as the domain that conferred toxicity, i.e., referred to as “DddAₜₒₓ” or the toxin domain.

### Effective Amount

[0131] The term “effective amount,” as used herein, refers to an amount of a biologically active agent that is sufficient to elicit a desired biological response. For example, in some embodiments, an effective amount of any of the fusion proteins as described herein, or compositions thereof, may refer to the amount of the fusion proteins sufficient to edit a target nucleotide sequence (e.g., mtDNA). In some embodiments, an effective amount of any of the fusion proteins as described herein, or compositions thereof (e.g., a fusion protein comprising a first mitoTALE or another pDNAbp and a first portion of a DddA, a second fusion protein comprising a second mitoTALE or another pDNAbp and a second portion of a DddA) that is sufficient to induce editing of a target nucleotide, which is proximal to a target nucleic acid sequence specifically bound and edited by the fusion protein (e.g., by the first or second mitoTALE). As will be appreciated by the skilled artisan, the effective amount of an agent (e.g., a fusion protein, a second fusion protein), may vary depending on various factors as, for example, on the desired biological response on the specific allele, genome, or target site to be edited, on the cell or tissue being targeted, and on the agent being used.

### Fusion Protein

[0132] The term “fusion protein” as used herein refers to a hybrid polypeptide which comprises protein domains from at least two different proteins (e.g., a first mitoTALE, a first portion of a DddA, a second mitoTALE, a second portion of a DddA). One protein may be located at the amino-terminal (N-terminal) portion of the fusion protein or at the carboxy-terminal (C-terminal) protein thus forming an “amino-terminal fusion protein” or a “carboxy-terminal fusion protein,” respectively. A protein may comprise different domains, for example, a nucleic acid binding site (e.g., a first or second mitoTALE) and a catalytic domain of a nucleic-acid editing protein (e.g., a first or second portion of a DddA). Another example includes a mitoTALE to a DddA or portion thereof. Any of the proteins provided herein may be produced by any method known in the art. For example, the proteins provided herein may be produced via recombinant protein expression and purification, which is especially suited for fusion proteins comprising a peptide linker. Methods for recombinant protein expression and purification are well known, and include those described by Green and Sambrook, Molecular Cloning: A Laboratory Manual (4^{th} ed., Cold Spring Harbor Laboratory Press, Cold Spring Harbor, N.Y. (2012)), the entire contents of which are incorporated herein by reference.

### Guide Nucleic Acid

[0133] In certain embodiments, the PACE-evolved DddA variants can be fused to an nucleic acid-programmable DNA binding protein (“napDNAbp”), such as Cas9. In such embodiments, the Cas9 domain requires a guide RNA (or more generically, a guide nucleic acid) to program the binding of the Cas9 to a target site. The term “guide nucleic acid” or “napDNAbp-programming nucleic acid molecule” or equivalently “guide sequence” refers the one or more nucleic acid molecules which associate with and direct or otherwise program a napDNAbp protein to localize to a specific target nucleotide sequence (e.g., a gene locus of a genome) that is complementary to the one or more nucleic acid molecules (or a portion or region thereof) associated with the protein, thereby causing the napDNAbp protein to bind to the nucleotide sequence at the specific target site. A non-limiting example is a guide RNA of a Cas protein of a CRISPR-Cas genome editing system.

[0134] Guide RNA is a particular type of guide nucleic acid which is mostly commonly associated with a Cas protein of a CRISPR-Cas9 and which associates with Cas9, directing the Cas9 protein to a specific sequence in a DNA molecule that includes complementarity to protospacer sequence of the guide RNA. As used herein, a “guide RNA” refers to a synthetic fusion of the endogenous bacterial crRNA and tracrRNA that provides both targeting specificity and scaffolding and/or binding ability for Cas9 nuclease to a target DNA. This synthetic fusion does not exist in nature and is also commonly referred to as an sgRNA. However, this term also embraces the equivalent guide nucleic acid molecules that associate with Cas9 equivalents, homologs, orthologs, or paralogs, whether naturally occurring or non-naturally occurring (e.g., engineered or recombinant), and which otherwise program the Cas9 equivalent to localize to a specific target nucleotide sequence. The Cas9 equivalents may include other napDNAbp from any type of CRISPR system (e.g., type II, V, VI), including Cpf1 (a type-V CRISPR-Cas systems), C2c1 (a type V CRISPR-Cas system), C2c2 (a type VI CRISPR-Cas system) and C2c3 (a type V CRISPR-Cas system). Further Cas-equivalents are described in Makarova et al., “C2c2 is a single-component programmable RNA-guided RNA-targeting CRISPR effector,” Science 2016; 353(6299), the contents of which are incorporated herein by reference. Exemplary sequences are and structures of guide RNAs are provided herein. In addition, methods for designing appropriate guide RNA sequences are provided herein.

Guide RNA (“gRNA”)

[0135] In embodiments involving pDNAbp/DddA base editors that comprise Cas9 domains as the pDNAbp component, the Cas9 domain requires a guide RNA (or more generically, a guide nucleic acid) to program the binding of the Cas9 to a target site. As used herein, the term “guide RNA” is a particular type of guide nucleic acid which is mostly commonly associated with a Cas protein of a CRISPR-Cas9 and which associates with Cas9, directing the Cas9 protein to a specific sequence in a DNA molecule that includes complementarity to protospacer sequence of the guide RNA. However, this term also embraces the equivalent guide nucleic acid molecules that associate with Cas9 equivalents, homologs, orthologs, or paralogs, whether naturally occurring or non-naturally occurring (e.g., engineered or recombinant), and which otherwise program the Cas9 equivalent to localize to a specific target nucleotide sequence. The Cas9 equivalents may include other napDNAbp from any type of CRISPR system (e.g., type II, V, VI), including Cpf1 (a type-V CRISPR-Cas systems), C2c1 (a type V CRISPR-Cas system), C2c2 (a type VI CRISPR-Cas system) and C2c3 (a type V CRISPR-Cas system). Further Cas-equivalents are described in Makarova et al., “C2c2 is a single-component programmable RNA-guided RNA-targeting CRISPR effector,” Science 2016; 353(6299), the contents of which are incorporated herein by reference. Exemplary sequences are and structures of guide RNAs are provided herein.

[0136] Guide RNAs may comprise various structural elements that include, but are not limited to (a) a spacer sequence—the sequence in the guide RNA (having ˜20 nts in length) which binds to a complementary strand of the target DNA (and has the same sequence as the protospacer of the DNA) and (b) a gRNA core (or gRNA scaffold or backbone sequence)—refers to the sequence within the gRNA that is responsible for Cas9 binding, it does not include the ˜20 bp spacer sequence that is used to guide Cas9 to target DNA.

### Guide RNA Target Sequence

[0137] As used herein, the “guide RNA target sequence” refers to the ˜20 nucleotides that are complementary to the protospacer sequence in the PAM strand. The target sequence is the sequence that anneals to or is targeted by the spacer sequence of the guide RNA. The spacer sequence of the guide RNA and the protospacer have the same sequence (except the spacer sequence is RNA and the protospacer is DNA).

### Guide RNA Scaffold Sequence

[0138] As used herein, the “guide RNA scaffold sequence” refers to the sequence within the gRNA that is responsible for napDNAbp binding, it does not include the 20 bp spacer/targeting sequence that is used to guide napDNAbp to target DNA.

### Host Cell

[0139] The term “host cell,” as used herein, refers to a cell that can host, replicate, and transfer a phage vector useful for a continuous evolution process as provided herein. In embodiments where the vector is a viral vector, a suitable host cell is a cell that may be infected by the viral vector, can replicate it, and can package it into viral particles that can infect fresh host cells. A cell can host a viral vector if it supports expression of genes of viral vector, replication of the viral genome, and/or the generation of viral particles. One criterion to determine whether a cell is a suitable host cell for a given viral vector is to determine whether the cell can support the viral life cycle of a wild-type viral genome that the viral vector is derived from. For example, if the viral vector is a modified M13 phage genome, as provided in some embodiments described herein, then a suitable host cell would be any cell that can support the wild-type M13 phage life cycle. Suitable host cells for viral vectors useful in continuous evolution processes are well known to those of skill in the art, and the disclosure is not limited in this respect. In some embodiments, the viral vector is a phage and the host cell is a bacterial cell. In some embodiments, the host cell is an E. coli cell. Suitable E. coli host strains will be apparent to those of skill in the art, and include, but are not limited to, New England Biolabs (NEB) Turbo, Top10F′, DH12S, ER2738, ER2267, and XL1-Blue MRF′. These strain names are art recognized and the genotype of these strains has been well characterized. It should be understood that the above strains are exemplary only and that the invention is not limited in this respect. The term “fresh,” as used herein interchangeably with the terms “non-infected” or “uninfected” in the context of host cells, refers to a host cell that has not been infected by a viral vector comprising a gene of interest as used in a continuous evolution process provided herein. A fresh host cell can, however, have been infected by a viral vector unrelated to the vector to be evolved or by a vector of the same or a similar type but not carrying the gene of interest.

[0140] In some embodiments, the host cell is a prokaryotic cell, for example, a bacterial cell. In some embodiments, the host cell is an E. coli cell. In some embodiments, the host cell is a eukaryotic cell, for example, a yeast cell, an insect cell, or a mammalian cell. The type of host cell, will, of course, depend on the viral vector employed, and suitable host cell/viral vector combinations will be readily apparent to those of skill in the art.

### Inteins and Split-Inteins

[0141] In some embodiments, the Evolved DddA-containing base editors or the polypeptides that comprise the Evolved DddA-containing base editors (e.g., the pDNAbps and DddA) may be engineered to include intein and/or split-intein amino acid sequences.

[0142] As used herein, the term “intein” refers to auto-processing polypeptide domains found in organisms from all domains of life. An intein (intervening protein) carries out a unique auto-processing event known as protein splicing in which it excises itself out from a larger precursor polypeptide through the cleavage of two peptide bonds and, in the process, ligates the flanking extein (external protein) sequences through the formation of a new peptide bond. This rearrangement occurs post-translationally (or possibly co-translationally), as intein genes are found embedded in frame within other protein-coding genes. Furthermore, intein-mediated protein splicing is spontaneous; it requires no external factor or energy source, only the folding of the intein domain. This process is also known as cis-protein splicing, as opposed to the natural process of trans-protein splicing with “split inteins.”

[0143] Split inteins are a sub-category of inteins. Unlike the more common contiguous inteins, split inteins are transcribed and translated as two separate polypeptides, the N-intein and C-intein, each fused to one extein. Upon translation, the intein fragments spontaneously and non-covalently assemble into the canonical intein structure to carry out protein splicing in trans.

[0144] Inteins and split inteins are the protein equivalent of the self-splicing RNA introns (see Perler et al., Nucleic Acids Res. 22:1125-1127 (1994)), which catalyze their own excision from a precursor protein with the concomitant fusion of the flanking protein sequences, known as exteins (reviewed in Perler et al., Curr. Opin. Chem. Biol. 1:292-299 (1997); Perler, F. B. Cell 92(1):1-4 (1998); Xu et al., EMBO J. 15(19):5146-5153 (1996)).

[0145] As used herein, the term “protein splicing” refers to a process in which an interior region of a precursor protein (an intein) is excised and the flanking regions of the protein (exteins) are ligated to form the mature protein. This natural process has been observed in numerous proteins from both prokaryotes and eukaryotes (Perler, F. B., Xu, M. Q., Paulus, H. Current Opinion in Chemical Biology 1997, 1, 292-299; Perler, F. B. Nucleic Acids Research 1999, 27, 346-347). The intein unit contains the necessary components needed to catalyze protein splicing and often contains an endonuclease domain that participates in intein mobility (Perler, F. B., Davis, E. O., Dean, G. E., Gimble, F. S., Jack, W. E., Neff, N., Noren, C. J., Thomer, J., Belfort, M. Nucleic Acids Research 1994, 22, 1127-1127). The resulting proteins are linked, however, not expressed as separate proteins. Protein splicing may also be conducted in trans with split inteins expressed on separate polypeptides spontaneously combine to form a single intein which then undergoes the protein splicing process to join to separate proteins.

[0146] The elucidation of the mechanism of protein splicing has led to a number of intein-based applications (Comb, et al., U.S. Pat. No. 5,496,714; Comb, et al., U.S. Pat. No. 5,834,247; Camarero and Muir, J. Amer. Chem. Soc., 121:5597-5598 (1999); Chong, et al., Gene, 192:271-281 (1997), Chong, et al., Nucleic Acids Res., 26:5109-5115 (1998); Chong, et al., J. Biol. Chem., 273:10567-10577 (1998); Cotton, et al. J. Am. Chem. Soc., 121:1100-1101 (1999); Evans, et al., J. Biol. Chem., 274:18359-18363 (1999); Evans, et al., J. Biol. Chem., 274:3923-3926 (1999); Evans, et al., Protein Sci., 7:2256-2264 (1998); Evans, et al., J. Biol. Chem., 275:9091-9094 (2000); Iwai and Pluckthun, FEBS Lett. 459:166-172 (1999); Mathys, et al., Gene, 231:1-13 (1999); Mills, et al., Proc. Natl. Acad. Sci. USA 95:3543-3548 (1998); Muir, et al., Proc. Natl. Acad. Sci. USA 95:6705-6710 (1998); Otomo, et al., Biochemistry 38:16040-16044 (1999); Otomo, et al., J. Biolmol. NMR 14:105-114 (1999); Scott, et al., Proc. Natl. Acad. Sci. USA 96:13638-13643 (1999); Severinov and Muir, J. Biol. Chem., 273:16205-16209 (1998); Shingledecker, et al., Gene, 207:187-195 (1998); Southworth, et al., EMBO J. 17:918-926 (1998); Southworth, et al., Biotechniques, 27:110-120 (1999); Wood, et al., Nat. Biotechnol., 17:889-892 (1999); Wu, et al., Proc. Natl. Acad. Sci. USA 95:9226-9231 (1998a); Wu, et al., Biochim Biophys Acta 1387:422-432 (1998b); Xu, et al., Proc. Natl. Acad. Sci. USA 96:388-393 (1999); Yamazaki, et al., J. Am. Chem. Soc., 120:5591-5592 (1998)). Each reference is incorporated herein by reference.

### Lentiviral Vectors

[0147] Lentiviral vectors are derived from human immunodeficiency virus-1 (HIV-1). The lentiviral genome consists of single-stranded RNA that is reverse-transcribed into DNA and then integrated into the host cell genome. Lentiviruses can infect both dividing and non-dividing cells, making them attractive tools for gene therapy.

[0148] The lentiviral genome is around 9 kb in length and contains three major structural genes: gag, pol, and env. The gag gene is translated into three viral core proteins: 1) matrix (MA) proteins, which are necessary for virion assembly and infection of non-dividing cells; 2) capsid (CA) proteins, which form the hydrophobic core of the virion; and 3) nucleocapsid (NC) proteins, which protect the viral genome by coating and associating tightly with the RNA. The pol gene encodes for the viral protease, reverse transcriptase, and integrase enzymes which are essential for viral replication. The env gene encodes for the viral surface glycoproteins, which are essential for virus entry into the host cell by enabling binding to cellular receptors and fusion with cellular membranes. In some embodiments, the viral glycoprotein is derived from vesicular stomatitis virus (VSV-G). The viral genome also contains regulatory genes, including tat and rev. Tat encodes transactivators critical for activating viral transcription, while rev encodes a protein that regulates the splicing and export of viral transcripts. Tat and rev are the first proteins synthesized following viral integration and are required to accelerate production of viral mRNAs.

[0149] To improve the safety of lentivirus, the components necessary for viral production are split across multiple vectors. In some embodiments, the disclosure relates to delivery of a heterologous gene (e.g., transgene) via a recombinant lentiviral transfer vector encoding one or more transgenes of interest flanked by long terminal repeat (LTR) sequences. These LTRs are identical nucleotide sequences that are repeated hundreds or thousands of times and facilitate the integration of the transfer plasmid sequences into the host cell genome. Methods of the current disclosure also describe one or more accessory plasmids. These accessory plasmids may include one or more lentiviral packaging plasmids, which encode the pol and rev genes that are necessary for the replication, splicing, and export of viral particles. The accessory plasmids may also include a lentiviral envelope plasmid, which encodes the genes necessary for producing the viral glycoproteins which will allow the viral particle to fuse with the host cell.

### Ligand-Dependent Intein

[0150] In some embodiments, the Evolved DddA-containing base editors or the polypeptides that comprise the Evolved DddA-containing base editors (e.g., the pDNAbps and DddA) may be engineered to include ligand-dependent inteins.

[0151] The term “ligand-dependent intein,” as used herein refers to an intein that comprises a ligand-binding domain. Typically, the ligand-binding domain is inserted into the amino acid sequence of the intein, resulting in a structure intein (N)-ligand-binding domain-intein (C). Typically, ligand-dependent inteins exhibit no or only minimal protein splicing activity in the absence of an appropriate ligand, and a marked increase of protein splicing activity in the presence of the ligand. In some embodiments, the ligand-dependent intein does not exhibit observable splicing activity in the absence of ligand but does exhibit splicing activity in the presence of the ligand. In some embodiments, the ligand-dependent intein exhibits an observable protein splicing activity in the absence of the ligand, and a protein splicing activity in the presence of an appropriate ligand that is at least 5 times, at least 10 times, at least 50 times, at least 100 times, at least 150 times, at least 200 times, at least 250 times, at least 500 times, at least 1000 times, at least 1500 times, at least 2000 times, at least 2500 times, at least 5000 times, at least 10000 times, at least 20000 times, at least 25000 times, at least 50000 times, at least 100000 times, at least 500000 times, or at least 1000000 times greater than the activity observed in the absence of the ligand. In some embodiments, the increase in activity is dose dependent over at least 1 order of magnitude, at least 2 orders of magnitude, at least 3 orders of magnitude, at least 4 orders of magnitude, or at least 5 orders of magnitude, allowing for fine-tuning of intein activity by adjusting the concentration of the ligand. Suitable ligand-dependent inteins are known in the art, and in include those provided below and those described in published U.S. Patent Application U.S. 2014/0065711 A1; Mootz et al., “Protein splicing triggered by a small molecule.” J. Am. Chem. Soc. 2002; 124, 9044-9045; Mootz et al., “Conditional protein splicing: a new tool to control protein structure and function in vitro and in vivo.” J. Am. Chem. Soc. 2003; 125, 10561-10569; Buskirk et al., Proc. Natl. Acad. Sci. USA. 2004; 101, 10505-10510); Skretas & Wood, “Regulation of protein activity with small-molecule-controlled inteins.” Protein Sci. 2005; 14, 523-532; Schwartz, et al., “Post-translational enzyme activation in an animal via optimized conditional protein splicing.” Nat. Chem. Biol. 2007; 3, 50-54; Peck et al., Chem. Biol. 2011; 18 (5), 619-630; the entire contents of each are hereby incorporated by reference. Exemplary sequences are as follows:

| | | SEQ ID |
|---|---|---|
| NAME | SEQUENCE OF LIGAND-DEPENDENT INTEIN | NO: |
| 2-4 | CLAEGTRIFDPVTGTTHRIEDVVDGRKPIHVVAAAKDGTLLARPVVSWFDQGTRDVIGLRIAGGAIVWATP | 17 |
| INTEIN: | DHKVLTEYGWRAAGELRKGDRVAGPGGSGNSLALSLTADQMVSALLDAEPPILYSEYDPTSPFSEASMMGL | |
| | LTNLADRELVHMINWAKRVPGFVDLTLHDQAHLLECAWLEILMIGLVWRSMEHPGKLLFAPNLLLDRNQG | |
| | KCVEGMVEIFDMLLATSSRFRMMNLQGEEFVCLKSIILLNSGVYTFLSSTLKSLEEKDHIHRALDKITDTLIH | |
| | LMAKAGLTLQQQHQRLAQLLLILSHIRHMSNKGMEHLYSMKYKNVVPLYDLLLEMLDAHRLHAGGSGAS | |
| | RVQAFADALDDKFLHDMLAEELRYSVIREVLPTRRARTFDLEVEELHTLVAEGVVVHNC | |
| 3-2 | CLAEGTRIFDPVTGTTHRIEDVVDGRKPIHVVAVAKDGTLLARPVVSWFDQGTRDVIGLRIAGGAIVWATPD | 18 |
| INTEIN | HKVLTEYGWRAAGELRKGDRVAGPGGSGNSLALSLTADQMVSALLDAEPPILYSEYDPTSPFSEASMMGLL | |
| | TNLADRELVHMINWAKRVPGFVDLTLHDQAHLLECAWLEILMIGLVWRSMEHPGKLLFAPNLLLDRNQGK | |
| | CVEGMVEIFDMLLATSSRFRMMNLQGEEFVCLKSIILLNSGVYTFLSSTLKSLEEKDHIHRALDKITDTLIHL | |
| | MAKAGLTLQQQHQRLAQLLLILSHIRHMSNKGMEHLYSMKYTNVVPLYDLLLEMLDAHRLHAGGSGASR | |
| | VQAFADALDDKFLHDMLAEELRYSVIREVLPTRRARTFDLEVEELHTLVAEGVVVHNC | |
| 30R3-1 | CLAEGTRIFDPVTGTTHRIEDVVDGRKPIHVVAAAKDGTLLARPVVSWFDQGTRDVIGLRIAGGATVWATP | 19 |
| INTEIN | DHKVLTEYGWRAAGELRKGDRVAGPGGSGNSLALSLTADQMVSALLDAEPPIPYSEYDPTSPFSEASMMGL | |
| | LTNLADRELVHMINWAKRVPGFVDLTLHDQAHLLECAWLEILMIGLVWRSMEHPGKLLFAPNLLLDRNQG | |
| | KCVEGMVEIFDMLLATSSRFRMMNLQGEEFVCLKSIILLNSGVYTFLSSTLKSLEEKDHIHRALDKITDTLIH | |
| | LMAKAGLTLQQQHQRLAQLLLILSHIRHMSNKGMEHLYSMKYKNVVPLYDLLLEMLDAHRLHAGGSGAS | |
| | RVQAFADALDDKFLHDMLAEGLRYSVIREVLPTRRARTFDLEVEELHTLVAEGVVVHNC | |
| 30R3-2 | CLAEGTRIFDPVTGTTHRIEDVVDGRKPIHVVAAAKDGTLLARPVVSWFDQGTRDVIGLRIAGGATVWATP | 20 |
| INTEIN | DHKVLTEYGWRAAGELRKGDRVAGPGGSGNSLALSLTADQMVSALLDAEPPILYSEYDPTSPFSEASMMGL | |
| | LTNLADRELVHMINWAKRVPGFVDLTLHDQAHLLECAWLEILMIGLVWRSMEHPGKLLFAPNLLLDRNQG | |
| | KCVEGMVEIFDMLLATSSRFRMMNLQGEEFVCLKSIILLNSGVYTFLSSTLKSLEEKDHIHRALDKITDTLIH | |
| | LMAKAGLTLQQQHQRLAQLLLILSHIRHMSNKGMEHLYSMKYKNVVPLYDLLLEMLDAHRLHAGGSGAS | |
| | RVQAFADALDDKFLHDMLAEELRYSVIREVLPTRRARTFDLEVEELHTLVAEGVVVHNC | |
| 30R3-3 | CLAEGTRIFDPVTGTTHRIEDVVDGRKPIHVVAAAKDGTLLARPVVSWFDQGTRDVIGLRIAGGATVWATP | 21 |
| INTEIN | DHKVLTEYGWRAAGELRKGDRVAGPGGSGNSLALSLTADQMVSALLDAEPPIPYSEYDPTSPFSEASMMGL | |
| | LTNLADRELVHMINWAKRVPGFVDLTLHDQAHLLECAWLEILMIGLVWRSMEHPGKLLFAPNLLLDRNQG | |
| | KCVEGMVEIFDMLLATSSRFRMMNLQGEEFVCLKSIILLNSGVYTFLSSTLKSLEEKDHIHRALDKITDTLIH | |
| | LMAKAGLTLQQQHQRLAQLLLILSHIRHMSNKGMEHLYSMKYKNVVPLYDLLLEMLDAHRLHAGGSGAS | |
| | RVQAFADALDDKFLHDMLAEELRYSVIREVLPTRRARTFDLEVEELHTLVAEGVVVHNC | |
| 37R3-1 | CLAEGTRIFDPVTGTTHRIEDVVDGRKPIHVVAAAKDGTLLARPVVSWFDQGTRDVIGLRIAGGATVWATP | 22 |
| INTEIN | DHKVLTEYGWRAAGELRKGDRVAGPGGSGNSLALSLTADQMVSALLDAEPPILYSEYNPTSPFSEASMMGL | |
| | LTNLADRELVHMINWAKRVPGFVDLTLHDQAHLLERAWLEILMIGLVWRSMEHPGKLLFAPNLLLDRNQG | |
| | KCVEGMVEIFDMLLATSSRFRMMNLQGEEFVCLKSIILLNSGVYTFLSSTLKSLEEKDHIHRALDKITDTLIH | |
| | LMAKAGLTLQQQHQRLAQLLLILSHIRHMSNKGMEHLYSMKYKNVVPLYDLLLEMLDAHRLHAGGSGAS | |
| | RVQAFADALDDKFLHDMLAEGLRYSVIREVLPTRRARTFDLEVEELHTLVAEGVVVHNC | |
| 37R3-2 | CLAEGTRIFDPVTGTTHRIEDVVDGRKPIHVVAAAKDGTLLARPVVSWFDQGTRDVIGLRIAGGAIVWATP | 23 |
| INTEIN | DHKVLTEYGWRAAGELRKGDRVAGPGGSGNSLALSLTADQMVSALLDAEPPILYSEYDPTSPFSEASMMGL | |
| | LTNLADRELVHMINWAKRVPGFVDLTLHDQAHLLERAWLEILMIGLVWRSMEHPGKLLFAPNLLLDRNQG | |
| | KCVEGMVEIFDMLLATSSRFRMMNLQGEEFVCLKSIILLNSGVYTFLSSTLKSLEEKDHIHRALDKITDTLIH | |
| | LMAKAGLTLQQQHQRLAQLLLILSHIRHMSNKGMEHLYSMKYKNVVPLYDLLLEMLDAHRLHAGGSGAS | |
| | RVQAFADALDDKFLHDMLAEGLRYSVIREVLPTRRARTFDLEVEELHTLVAEGVVVHNC | |
| 37R3-3 | CLAEGTRIFDPVTGTTHRIEDVVDGRKPIHVVAVAKDGTLLARPVVSWFDQGTRDVIGLRIAGGATVWATPD | 24 |
| INTEIN | HKVLTEYGWRAAGELRKGDRVAGPGGSGNSLALSLTADQMVSALLDAEPPILYSEYDPTSPFSEASMMGLL | |
| | TNLADRELVHMINWAKRVPGFVDLTLHDQAHLLERAWLEILMIGLVWRSMEHPGKLLFAPNLLLDRNQGK | |
| | CVEGMVEIFDMLLATSSRFRMMNLQGEEFVCLKSIILLNSGVYTFLSSTLKSLEEKDHIHRALDKITDTLIHL | |
| | MAKAGLTLQQQHQRLAQLLLILSHIRHMSNKGMEHLYSMKYKNVVPLYDLLLEMLDAHRLHAGGSGASR | |
| | VQAFADALDDKFLHDMLAEELRYSVIREVLPTRRARTFDLEVEELHTLVAEGVVVHNC | |

### Linker

[0152] In various embodiments, the herein disclosed fusion proteins (e.g., the evolved-DddA containing base editors) or the polypeptides that comprise the Evolved DddA-containing base editors (e.g., the pDNAbps and DddA) may be engineered to include one or more linker sequences that join two or more polypeptides (e.g., a pDNAbp and a DddA halt) to one another.

[0153] The term “linker,” as used herein, refers to a molecule linking two other molecules or moieties. The linker can be an amino acid sequence in the case of a linker joining two fusion proteins. For example, a first or second mitoTALE can be fused to a first or second portion of a DddA, by an amino acid linker sequence. The linker can also be a nucleotide sequence in the case of joining two nucleotide sequences together. In other embodiments, the linker is an organic molecule, group, polymer, or chemical moiety. In some embodiments, the linker is 1-100 amino acids in length, for example, 1, 2, 3,4, 5,6, 7, 8,9, 10, 11, 12, 13, 14, 15, 16, 17, 18, 19, 20, 21, 22, 23, 24, 25, 26, 27, 28, 29, 30, 30-35, 35-40, 40-45, 45-50, 50-60, 60-70, 70-80, 80-90, 90-100, 100-150, or 150-200 amino acids in length. Longer linkers are also contemplated. mitoTALE

[0154] In various embodiments, the Evolved DddA-containing base editors embrace fusion proteins comprising a DddA (or inactive fragment thereof) and a mitoTALE domain. As used herein, a “mitoTALE” protein or domain refers to a modified TALE protein that can be designed to localize to the mitochondria. In one embodiment, a mitoTALE comprises a TALE domain fused to a mitochondrial targeting sequences (MTS). In another embodiment, a mitoTALE comprises a TALE domain fused to an MTS in place of the endogenous LS (localization signal) of the TALE, or into the repeat variable diresidue (RVD) of the TALE. MTS domains can include, but are not limited to, SOD2, Cox8a, bipartite nuclear localization signals (BPNLS), zmLOC100282174 MLS), which are disclosed herein.

[0155] Transcription activator-like effector proteins (TALE proteins) are class of naturally occurring DNA binding proteins which bind specific promoter sequences and which can activate the expression of genes. TALE proteins can be engineered to recognize a desired DNA sequence. TALEs have a modular DNA-binding domain (DBD) consisting of repetitive sequences of amino acids with each repeat region comprising of 34 amino acids. The two amino acids at residue positions 12 and 13 of each repeat region determine the nucleotide specificity of the TALE. This pair of residues is referred to as the repeat variable diresidue (RVD). A final region, known as the half-repeat, is typically truncated to 20 amino acids. Using these factors, one of ordinary skill in the art can synthesize sequence-specific synthetic TALEs, which target user defined nucleotide sequences. See Garg A.; Lohmueller J. J.; Silver P. A.; Armel T. Z. (2012), “Engineering synthetic TAL effectors with orthogonal target sites,” Nucleic Acids Res. 40, 7584-7595, which is incorporated herein by reference. Further reference to designing sequence specific TALEs can be found in Carlson et al., “Targeting DNA with fingers and TALENs,” Mol. Ther. Nucleic Acids, 2012, 1, e3.10.1038/mtna.2011, which is incorporated herein by reference. For example, the C-terminus typically contains a localization signal (LS), which directs a TALE to the particular cellular component (e.g., mitochondria), as well as a functional domain that modulates transcription, such as an acidic activation domain (AD). The endogenous LS can be replaced by an organism-specific localization signal, such as a specific MLS to localize the TALE to the mitochondria. For example, an LS derived from the simian virus 40 large T-antigen can be used in mammalian cells.

### MitoZFP

[0156] In various embodiments, the Evolved DddA-containing base editors embrace fusion proteins comprising a DddA (or inactive fragment thereof) and a mitoZFP domain.

[0157] A “zinc finger DNA binding protein” or “ZFP” is a protein, or a domain within a larger protein, that binds DNA in a sequence-specific manner through one or more zinc fingers, which are regions of amino acid sequence within the binding domain whose structure is stabilized through coordination of a zinc ion. The term zinc finger DNA binding protein can be abbreviated as zinc finger protein or ZFP. A “mitoZFP” refers to a zinc finger DNA binding protein that has been modified to comprise one or more mitochondrial targeting sequences (MTS).

[0158] Zinc finger binding domains can be “engineered” to bind to a predetermined nucleotide sequence. Non-limiting examples of methods for engineering zinc finger proteins are design and selection. A designed zinc finger protein is a protein not occurring in nature whose design/composition results principally from rational criteria. Rational criteria for design include application of substitution rules and computerized algorithms for processing information in a database storing information of existing ZFP designs and binding data. See, for example, U.S. Pat. Nos. 6,140,081; 6,453,242; 6,534,261; and 6,785,613; see, also WO 98/53058; WO 98/53059; WO 98/53060; WO 02/016536 and WO 03/016496; and U.S. Pat. Nos. 6,746,838; 6,866,997; and 7,030,215, each of which are incorporated herein by reference.

[0159] Zinc-finger nucleases (“ZFNs”) are artificial restriction enzymes generated by fusing a zinc finger DNA-binding domain to a DNA-cleavage domain. Zinc finger domains can be engineered to target specific desired DNA sequences and this enables zinc-finger nucleases to target unique sequences within complex genomes.

[0160] The DNA-binding domains of individual ZFNs typically contain between three and six individual zinc finger repeats and can each recognize between 9 and 18 base pairs. If the zinc finger domains are perfectly specific for their intended target site then even a pair of 3-finger ZFNs that recognize a total of 18 base pairs can, in theory, target a single locus in a mammalian genome. The most straightforward method to generate new zinc-finger arrays is to combine smaller zinc-finger “modules” of known specificity. The most common modular assembly process involves combining three separate zinc fingers that can each recognize a 3 base pair DNA sequence to generate a 3-finger array that can recognize a 9 base pair target site.

### Mitochondrial Targeting Sequence (MTS)

[0161] In various embodiments, the Evolved DddA-containing base editors or the polypeptides that comprise the Evolved DddA-containing base editors (e.g., the pDNAbps and DddA) may be engineered to include one or more mitochondrial targeting sequences (MTS) (or mitochondrial localization sequence (MLS)) which facilitate that translocation of a polypeptide into the mitochondria. MTS are known in the art and exemplary sequences are provided herein. In general MTSs are short peptide sequences (about 3-70 amino acids long) that direct a newly synthesized protein to the mitochondria within a cell. It is usually found at the N-terminus and consists of an alternating pattern of hydrophobic and positively charged amino acids to form what is called an amphipathic helix. Mitochondrial localization sequences can contain additional signals that subsequently target the protein to different regions of the mitochondria, such as the mitochondrial matrix. One exemplary mitochondrial localization sequence is the mitochondrial localization sequence derived from Cox8, a mitochondrial cytochrome c oxidase subunit VIII. In embodiments, a mitochondrial localization sequence derived from Cox8 includes the amino acid sequence: MSVLTPLLLRGLTGSARRLPVPRAKIHSL (SEQ ID NO: 14). In the embodiments, the mitochondrial localization sequence derived from Cox8 includes an amino acid sequence that is about 50%, 55%, 60%, 65%, 70%, 75%, 80%, 85%, 90% or 95% identity to SEQ ID NO: 14.

### Nucleic Acid Molecule

[0162] The term “nucleic acid,” as used herein, refers to a polymer of nucleotides. The polymer may include natural nucleosides (i.e., adenosine, thymidine, guanosine, cytidine, uridine, deoxyadenosine, deoxythymidine, deoxyguanosine, and deoxycytidine), nucleoside analogs (e.g., 2-aminoadenosine, 2-thiothymidine, inosine, pyrrolo-pyrimidine, 3-methyl adenosine, 5-methylcytidine, C5 bromouridine, C5 fluorouridine, C5 iodouridine, C5 propynyl uridine, C5 propynyl cytidine, C5 methylcytidine, 7 deazaadenosine, 7 deazaguanosine, 8 oxoadenosine, 8 oxoguanosine, O(6) methylguanine, 4-acetylcytidine, 5-(carboxyhydroxymethyl)uridine, dihydrouridine, methylpseudouridine, 1-methyl adenosine, 1-methyl guanosine, N6-methyl adenosine, and 2-thiocytidine), chemically modified bases, biologically modified bases (e.g., methylated bases), intercalated bases, modified sugars (e.g., 2′-fluororibose, ribose, 2′-deoxyribose, 2′-O-methylcytidine, arabinose, and hexose), or modified phosphate groups (e.g., phosphorothioates and 5′ N phosphoramidite linkages).

### Mutation

[0163] The term “mutation,” as used herein, refers to a substitution of a residue within a sequence, e.g. a nucleic acid or amino acid sequence, with another residue; a deletion or insertion of one or more residues within a sequence; or a substitution of a residue within a sequence of a genome in a subject to be corrected. Mutations are typically described herein by identifying the original residue followed by the position of the residue within the sequence and by the identity of the newly substituted residue. Various methods for making the amino acid substitutions (mutations) provided herein are well known in the art, and are provided by, for example, Green and Sambrook, Molecular Cloning: A Laboratory Manual (4^{th} ed., Cold Spring Harbor Laboratory Press, Cold Spring Harbor, N.Y. (2012)). Mutations can include a variety of categories, such as single base polymorphisms, microduplication regions, indel, and inversions, and is not meant to be limiting in any way. Mutations can include “loss-of-function” mutations which are mutations that reduce or abolish a protein activity. Most loss-of-function mutations are recessive, because in a heterozygote the second chromosome copy carries an unmutated version of the gene coding for a fully functional protein whose presence compensates for the effect of the mutation. There are some exceptions where a loss-of-function mutation is dominant, one example being haploinsufficiency, where the organism is unable to tolerate the approximately 50% reduction in protein activity suffered by the heterozygote. This is the explanation for a few genetic diseases in humans, including Marfan syndrome, which results from a mutation in the gene for the connective tissue protein called fibrillin. Mutations also embrace “gain-of-function” mutations, which is one which confers an abnormal activity on a protein or cell that is otherwise not present in a normal condition. Many gain-of-function mutations are in regulatory sequences rather than in coding regions, and can therefore have a number of consequences. For example, a mutation might lead to one or more genes being expressed in the wrong tissues, these tissues gaining functions that they normally lack. Alternatively, the mutation could lead to overexpression of one or more genes involved in control of the cell cycle, thus leading to uncontrolled cell division and hence to cancer. Because of their nature, gain-of-function mutations are usually dominant.

### NapDNAbp

[0164] In various embodiments, the Evolved DddA-containing base editors may comprise pDNAbps which are nucleic acid programmable. The term “napDNAbp” which stand for “nucleic acid programmable DNA binding protein” refers to any protein that may associate (e.g., form a complex) with one or more nucleic acid molecules (i.e., which may broadly be referred to as a “napDNAbp-programming nucleic acid molecule” and includes, for example, guide RNA in the case of Cas systems) which direct or otherwise program the protein to localize to a specific target nucleotide sequence (e.g., a gene locus of a genome) that is complementary to the one or more nucleic acid molecules (or a portion or region thereof) associated with the protein, thereby causing the protein to bind to the nucleotide sequence at the specific target site. This term napDNAbp embraces CRISPR-Cas9 proteins, as well as Cas9 equivalents, homologs, orthologs, or paralogs, whether naturally occurring or non-naturally occurring (e.g., engineered or modified), and may include a Cas9 equivalent from any type of CRISPR system (e.g., type II, V, VI), including Cpf1 (a type-V CRISPR-Cas systems), C2c1 (a type V CRISPR-Cas system), C2c2 (a type VI CRISPR-Cas system), C2c3 (a type V CRISPR-Cas system), dCas9, GeoCas9, CjCas9, Cas12a, Cas12b, Cas12c, Cas12d, Cas12g, Cas12h, Cas12i, Cas13d, Cas14, Argonaute, and nCas9. Further Cas-equivalents are described in Makarova et al., “C2c2 is a single-component programmable RNA-guided RNA-targeting CRISPR effector,” Science 2016; 353 (6299), the contents of which are incorporated herein by reference. However, the nucleic acid programmable DNA binding protein (napDNAbp) that may be used in connection with this invention are not limited to CRISPR-Cas systems. The invention embraces any such programmable protein, such as the Argonaute protein from Natronobacterium gregoryi (NgAgo) which may also be used for DNA-guided genome editing. NgAgo-guide DNA system does not require a PAM sequence or guide RNA molecules, which means genome editing can be performed simply by the expression of generic NgAgo protein and introduction of synthetic oligonucleotides on any genomic sequence. See Gao et al., DNA-guided genome editing using the Natronobacterium gregoryi Argonaute. Nature Biotechnology 2016; 34(7):768-73, which is incorporated herein by reference.

[0165] In some embodiments, the napDNAbp is a RNA-programmable nuclease, when in a complex with an RNA, may be referred to as a nuclease:RNA complex. Typically, the bound RNA(s) is referred to as a guide RNA (gRNA). gRNAs can exist as a complex of two or more RNAs, or as a single RNA molecule. gRNAs that exist as a single RNA molecule may be referred to as single-guide RNAs (sgRNAs), though “gRNA” is used interchangeably to refer to guide RNAs that exist as either single molecules or as a complex of two or more molecules. Typically, gRNAs that exist as single RNA species comprise two domains: (1) a domain that shares homology to a target nucleic acid (e.g., and directs binding of a Cas9 (or equivalent) complex to the target); and (2) a domain that binds a Cas9 protein. In some embodiments, domain (2) corresponds to a sequence known as a tracrRNA, and comprises a stem-loop structure. For example, in some embodiments, domain (2) is homologous to a tracrRNA as depicted in FIG. 1E of Jinek et al., Science 337:816-821(2012), the entire contents of which is incorporated herein by reference. Other examples of gRNAs (e.g., those including domain 2) can be found in U.S. Pat. No. 9,340,799, entitled “mRNA-Sensing Switchable gRNAs,” and International Patent Application No. PCT/US2014/054247, filed Sep. 6, 2013, published as WO 2015/035136 and entitled “Delivery System For Functional Nucleases,” the entire contents of each are herein incorporated by reference. In some embodiments, a gRNA comprises two or more of domains (1) and (2), and may be referred to as an “extended gRNA.” For example, an extended gRNA will, e.g., bind two or more Cas9 proteins and bind a target nucleic acid at two or more distinct regions, as described herein. The gRNA comprises a nucleotide sequence that complements a target site, which mediates binding of the nuclease/RNA complex to said target site, providing the sequence specificity of the nuclease:RNA complex. In some embodiments, the RNA-programmable nuclease is the (CRISPR-associated system) Cas9 endonuclease, for example Cas9 (Csn1) from Streptococcus pyogenes (see, e.g., “Complete genome sequence of an M1 strain of Streptococcus pyogenes.” Ferretti J. J. et al., Proc. Natl. Acad. Sci. U.S.A. 98:4658-4663(2001); “CRISPR RNA maturation by trans-encoded small RNA and host factor RNase III.” Deltcheva E. et al., Nature 471:602-607(2011); and “A programmable dual-RNA-guided DNA endonuclease in adaptive bacterial immunity.” Jinek M. et al., Science 337:816-821(2012), the entire contents of each of which are incorporated herein by reference.

[0166] The napDNAbp nucleases (e.g., Cas9) use RNA:DNA hybridization to target DNA cleavage sites, these proteins are able to be targeted, in principle, to any sequence specified by the guide RNA. Methods of using napDNAbp nucleases, such as Cas9, for site-specific cleavage (e.g., to modify a genome) are known in the art (see e.g., Cong, L. et al. Multiplex genome engineering using CRISPR/Cas systems. Science 339, 819-823 (2013); Mali, P. et al. RNA-guided human genome engineering via Cas9. Science 339, 823-826 (2013); Hwang, W. Y. et al. Efficient genome editing in zebrafish using a CRISPR-Cas system. Nature Biotechnology 31, 227-229 (2013); Jinek, M. et al. RNA-programmed genome editing in human cells. eLife 2, e00471 (2013); Dicarlo, J. E. et al., Genome engineering in Saccharomyces cerevisiae using CRISPR-Cas systems. Nucleic Acid Res. (2013); Jiang, W. et al. RNA-guided editing of bacterial genomes using CRISPR-Cas systems. Nature Biotechnology 31, 233-239 (2013); the entire contents of each of which are incorporated herein by reference).

### Nickase

[0167] The term “nickase” refers to a napDNAbp having only a single nuclease activity that cuts only one strand of a target DNA, rather than both strands. Thus, a nickase type napDNAbp does not leave a double-strand break.

### Nuclear Localization Signal

[0168] In various embodiments, the Evolved DddA-containing base editors or the polypeptides that comprise the Evolved DddA-containing base editors (e.g., the pDNAbps and DddA) may be further engineered to include one or more nuclear localization signals.

[0169] A nuclear localization signal or sequence (NLS) is an amino acid sequence that tags, designates, or otherwise marks a protein for import into the cell nucleus by nuclear transport. Typically, this signal consists of one or more short sequences of positively charged lysines or arginines exposed on the protein surface. Different nuclear localized proteins may share the same NLS. An NLS has the opposite function of a nuclear export signal (NES), which targets proteins out of the nucleus. Thus, a single nuclear localization signal can direct the entity with which it is associated to the nucleus of a cell. Such sequences may be of any size and composition, for example more than 25, 25, 15, 12, 10, 8, 7, 6, 5, or 4 amino acids, but will preferably comprise at least a four to eight amino acid sequence known to function as a nuclear localization signal (NLS).

### Nucleic Acid Molecule

[0170] The term “nucleic acid molecule” as used herein, refers to RNA as well as single and/or double-stranded DNA. Nucleic acid molecules may be naturally occurring, for example, in the context of a genome, a transcript, an mRNA, tRNA, rRNA, siRNA, snRNA, a plasmid, cosmid, chromosome, chromatid, or other naturally occurring nucleic acid molecule. On the other hand, a nucleic acid molecule may be a non-naturally occurring molecule, e.g. a recombinant DNA or RNA, an artificial chromosome, an engineered genome, or fragment thereof, or a synthetic DNA, RNA, DNA/RNA hybrid, or including non-naturally occurring nucleotides or nucleosides. Furthermore, the terms “nucleic acid,” “DNA,” “RNA,” and/or similar terms include nucleic acid analogs, e.g. analogs having other than a phosphodiester backbone. Nucleic acids may be purified from natural sources, produced using recombinant expression systems and optionally purified, chemically synthesized, etc. Where appropriate, e.g. in the case of chemically synthesized molecules, nucleic acids may comprise nucleoside analogs such as analogs having chemically modified bases or sugars, and backbone modifications. A nucleic acid sequence is presented in the 5′ to 3′ direction unless otherwise indicated. In some embodiments, a nucleic acid is or comprises natural nucleosides (e.g. adenosine, thymidine, guanosine, cytidine, uridine, deoxyadenosine, deoxythymidine, deoxyguanosine, and deoxycytidine); nucleoside analogs (e.g. 2-aminoadenosine, 2-thiothymidine, inosine, pyrrolo-pyrimidine, 3-methyl adenosine, 5-methylcytidine, 2-aminoadenosine, C5-bromouridine, C5-fluorouridine, C5-iodouridine, C5-propynyl-uridine, C5-propynyl-cytidine, C5-methylcytidine, 2-aminoadenosine, 7-deazaadenosine, 7-deazaguanosine, inosinedenosine, 8-oxoguanosine, 0(6)-methylguanine, and 2-thiocytidine); chemically modified bases; biologically modified bases (e.g. methylated bases); intercalated bases; modified sugars (e.g. 2′-fluororibose, ribose, 2′-deoxyribose, arabinose, and hexose); and/or modified phosphate groups (e.g. phosphorothioates and 5′-N-phosphoramidite linkages).

### PACE and PANCE

[0171] The term “phage-assisted continuous evolution (PACE),” as used herein, refers to continuous evolution that employs phage as viral vectors and is described in Thuronyi, B. W. et al. Nat Biotechnol 37, 1070-1079 (2019), the contents of which are incorporated herein by reference in their entirety. The general concept of PACE technology has also been described, for example, in International PCT Application, PCT/US2009/056194, filed Sep. 8, 2009, published as WO 2010/028347 on Mar. 11, 2010; International PCT Application, PCT/US2011/066747, filed Dec. 22, 2011, published as WO 2012/088381 on Jun. 28, 2012; U.S. Application, U.S. Pat. No. 9,023,594, issued May 5, 2015, International PCT Application, PCT/US2015/012022, filed Jan. 20, 2015, published as WO 2015/134121 on Sep. 11, 2015, and International PCT Application, PCT/US2016/027795, filed Apr. 15, 2016, published as WO 2016/168631 on Oct. 20, 2016, the entire contents of each of which are incorporated herein by reference. PACE can be used, for instance, to evolve a deaminase (e.g., a cytidine or adenosine deaminase) which uses single strand DNA as a substrate to obtain a deaminase which is capable of using double-strand DNA as a substrate (e.g., DddA).

[0172] Variant Cas9s may also be obtain by phage-assisted non-continuous evolution (PANCE), which as used herein, refers to non-continuous evolution that employs phage as viral vectors. PANCE is a simplified technique for rapid in vivo directed evolution using serial flask transfers of evolving ‘selection phage’ (SP), which contain a gene of interest to be evolved, across fresh E. coli host cells, thereby allowing genes inside the host E. coli to be held constant while genes contained in the SP continuously evolve. Serial flask transfers have long served as a widely-accessible approach for laboratory evolution of microbes, and, more recently, analogous approaches have been developed for bacteriophage evolution. The PANCE system features lower stringency than the PACE system.

### Evolved DddA-Containing Base Editors

[0173] As used herein, the present disclosure describes use continuous evolution-based methods (e.g., PACE) to evolve DddA-containing base editors. In various embodiments, the evolved DddA can be linked to a programmable DNA binding protein (pDNAbp), which can include various such types of proteins, including but not limited to, TALE proteins, mitoTALE proteins (i.e., TALE proteins that specifically target mitochondria), zinc finger protein, and napDNAbps, such as Cas9. In principle, the evolved DddA-containing base editors may be used to edit any target double stranded DNA substrate in the cell, including in the cytoplasm, in the nucleus, or in an organelle such as a mitochondria. Preferably, when targeting mitochondrial DNA base editing, the evolved DddA-containing base editors comprise a mitoTALE or a zinc finger DNA binding protein. Amino acid sequences of exemplary evolved DddA-containing based editors and components thereof are provided herein, e.g., in XIII. Sequences.

Programmable DNA Binding Protein (pDNAbp)

[0174] As used herein, the term “programmable DNA binding protein,” “pDNA binding protein,” “pDNA binding protein domain” or “pDNAbp” refers to any protein that localizes to and binds a specific target DNA nucleotide sequence (e.g. a gene locus of a genome). This term embraces RNA-programmable proteins, which associate (e.g. form a complex) with one or more nucleic acid molecules (i.e., which includes, for example, guide RNA in the case of Cas systems) that direct or otherwise program the protein to localize to a specific target nucleotide sequence (e.g., DNA sequence) that is complementary to the one or more nucleic acid molecules (or a portion or region thereof) associated with the protein. The term also embraces proteins which bind directly to nucleotide sequence in an amino acid-programmable manner, e.g., zinc finger proteins and TALE proteins. Exemplary RNA-programmable proteins are CRISPR-Cas9 proteins, as well as Cas9 equivalents, homologs, orthologs, or paralogs, whether naturally occurring or non-naturally occurring (e.g. engineered or modified), and may include a Cas9 equivalent from any type of CRISPR system (e.g. type II, V, VI), including Cpf1 (a type-V CRISPR-Cas systems), C2c1 (a type V CRISPR-Cas system), C2c2 (a type VI CRISPR-Cas system), C2c3 (a type V CRISPR-Cas system), dCas9, GeoCas9, CjCas9, Cas12a, Cas12b, Cas12c, Cas12d, Cas12g, Cas12h, Cas12i, Cas13d, Cas14, Argonaute, and nCas9. Further Cas-equivalents are described in Makarova et al., “C2c2 is a single-component programmable RNA-guided RNA-targeting CRISPR effector,” Science 2016; 353(6299), the contents of which are incorporated herein by reference. When targeting the editing of mitochondrial DNA, it if preferable that the DNA binding protein and/or the evolved DddA protein are configured with a mitochondrial signal sequence.

### Promoter

[0175] The term “promoter” is recognized in the art as referring to a nucleic acid molecule with a sequence recognized by the cellular transcription machinery and able to initiate transcription of a downstream (i.e., closer to or toward the 3′ end of the nucleic acid strand) gene. A promoter can be constitutively active, meaning that the promoter is always active in a given cellular context, or conditionally active, meaning that the promoter is only active in the presence of a specific condition. For example, a conditional promoter may only be active in the presence of a specific protein that connects a protein associated with a regulatory element in the promoter to the basic transcriptional machinery, or only in the absence of an inhibitory molecule. A subclass of conditionally active promoters are inducible promoters that require the presence of a small molecule “inducer” for activity. Examples of inducible promoters include, but are not limited to, arabinose-inducible promoters, Tet-on promoters, and tamoxifen-inducible promoters. A variety of constitutive, conditional, and inducible promoters are well known to the skilled artisan, and the skilled artisan will be able to ascertain a variety of such promoters useful in carrying out the instant invention, which is not limited in this respect.

### Protein, Peptide, and Polypeptide

[0176] The terms “protein,” “peptide,” and “polypeptide” are used interchangeably herein, and refer to a polymer of amino acid residues linked together by peptide (amide) bonds. The terms refer to a protein, peptide, or polypeptide of any size, structure, or function. Typically, a protein, peptide, or polypeptide will be at least three amino acids long. A protein, peptide, or polypeptide may refer to an individual protein or a collection of proteins. One or more of the amino acids in a protein, peptide, or polypeptide may be modified, for example, by the addition of a chemical entity such as a carbohydrate group, a hydroxyl group, a phosphate group, a farnesyl group, an isofarnesyl group, a fatty acid group, a linker for conjugation, functionalization, or other modification, etc. A protein, peptide, or polypeptide may also be a single molecule or may be a multi-molecular complex. A protein, peptide, or polypeptide may be just a fragment of a naturally occurring protein or peptide. A protein, peptide, or polypeptide may be naturally occurring, recombinant, or synthetic, or any combination thereof. Any of the proteins provided herein may be produced by any method known in the art. For example, the proteins provided herein may be produced via recombinant protein expression and purification, which is especially suited for fusion proteins comprising a peptide linker. Methods for recombinant protein expression and purification are well known, and include those described by Green and Sambrook, Molecular Cloning: A Laboratory Manual (4th ed., Cold Spring Harbor Laboratory Press, Cold Spring Harbor, N.Y. (2012)), the entire contents of which are incorporated herein by reference.

[0177] The term “amino acid” refers to naturally occurring and synthetic amino acids, as well as amino acid analogs and amino acid mimetics that function in a manner similar to the naturally occurring amino acids. Naturally occurring amino acids are those encoded by the genetic code, as well as those amino acids that are later modified, e.g., hydroxyproline, γ-carboxyglutamate, and O-phosphoserine. Amino acid analogs refers to compounds that have the same basic chemical structure as a naturally occurring amino acid, i.e., an a carbon that is bound to a hydrogen, a carboxyl group, an amino group, and an R group, e.g., homoserine, norleucine, methionine sulfoxide, methionine methyl sulfonium. Such analogs have modified R groups {e.g., norleucine) or modified peptide backbones, but retain the same basic chemical structure as a naturally occurring amino acid. Amino acid mimetics refers to chemical compounds that have a structure that is different from the general chemical structure of an amino acid, but that functions in a manner similar to a naturally occurring amino acid. The terms “non-naturally occurring amino acid” and “unnatural amino acid” refer to amino acid analogs, synthetic amino acids, and amino acid mimetics which are not found in nature.

[0178] Amino acids may be referred to herein by either their commonly known three letter symbols or by the one-letter symbols recommended by the njPAC-R7B Biochemical Nomenclature Commission. Nucleotides, likewise, may be referred to by their commonly accepted single-letter codes. The terms “polypeptide,” “peptide” and “protein” are used interchangeably herein to refer to a polymer of amino acid residues, wherein the polymer may in embodiments be conjugated to a moiety that does not consist of amino acids. The terms apply to amino acid polymers in which one or more amino acid residue is an artificial chemical mimetic of a corresponding naturally occurring amino acid, as well as to naturally occurring amino acid polymers and non-naturally occurring amino acid polymers. A “fusion protein” refers to a chimeric protein encoding two or more separate protein sequences that are recombinantly expressed as a single moiety.

[0179] As to amino acid sequences, one of skill will recognize that individual substitutions, deletions or additions to a nucleic acid, peptide, polypeptide, or protein sequence which alters, adds or deletes a single amino acid or a small percentage of amino acids in the encoded sequence is a “conservatively modified variant” where the alteration results in the substitution of an amino acid with a chemically similar amino acid. Conservative substitution tables providing functionally similar amino acids are well known in the art. Such conservatively modified variants are in addition to and do not exclude polymorphic variants, interspecies homologs, and alleles of the invention. The following eight groups each contain amino acids that are conservative substitutions for one another:
[0180] 1) Alanine (A), Glycine (G);
[0181] 2) Aspartic acid (D), Glutamic acid (E);
[0182] 3) Asparagine (N), Glutamine (Q);
[0183] 4) Arginine (R), Lysine (K);
[0184] 5) Isoleucine (I), Leucine (L), Methionine (M), Valine (V);
[0185] 6) Phenylalanine (F), Tyrosine (Y), Tryptophan (W);
[0186] 7) Serine (S), Threonine (T); and
[0187] 8) Cysteine (C), Methionine (M).

### Split Site (e.g., of a DddA)

[0188] As used herein, the term “split site,” as in a split site of a DddA, refers to a specific peptide bond between any two immediately adjacent amino acid residues in the amino acid sequence of a DddA at which the complete DddA polypeptide is divided into two half portions, i.e., an N-terminal half portion and a C-terminal half portion. The N-terminal half portion of the DddA may be referred to as “DddA-N half” and the C-terminal half portion of the DddA may be referred to as the “DddA-C half.” Alternately, DddA-N half may be referred to as the “DddA-N fragment or portion” and the DddA-C half may be referred to as the “DddA-C fragment of portion.” Depending on the location of the split site, the DddA-N half and the DddA-C half may be the same or different size and/or sequence length. The term “half” does not connote the requirement that the DddA-N and DddA-C portions are identically half of the size and/or sequence length of a complete DddA, or that the split site is required to be at the mid-point of the complete DddA polypeptide. To the contrary, and as noted above, the split site can be between any pair of residues in the DddA polypeptide, thereby giving rise to half portions which are unequal in size and/or sequence length. For clarity, as used herein, the term “half” when used in the context of a split molecule (e.g., protein, intein, delivery molecule, nucleic acid, etc.), shall not be interpreted to require, and shall not imply, that the size of the resulting portions (e.g., as “split” or broken into smaller portions) of the molecule are one-half (e.g., ½, 50%) of the original molecule. The term shall be interpreted to be illustrative of idea that they are portion(s) of a larger molecule that has been broken into smaller fragments (e.g., portions), but that when reconstituted may regain the activity of the molecule as a whole. Thus, by way of example, a half (e.g., portion) may be any portion of the molecule from which it is obtained (e.g., is less than 100% of the whole of the molecule), such that there is at least one additional portion formed (e.g., a second half, other half, second portion), which also is less than 100% of the whole of the molecule. It is important to note, that the molecule may be formed into additional portions (e.g., third, fourth, etc., halves (e.g., portions)), which is readily envisioned by using the term definition above, and such additional halves to not constitute a molecule larger than or in addition to the whole from which they were derived. Further, it should be noted that in the event there are more than two halves (e.g., two portions) formed from the splitting of a molecule it may only require two of the portions to reconstitute the activity of the molecule as a whole. By way of example, if an enzyme is split into three halves (e.g., three portions), wherein the catalytic domain of the enzyme possessing the enzymatic activity of interest is only split into two halves (e.g., two portions) only the two portions of the catalytic domain may be necessary to be used to carry out the activity of interest. Thus, when referring to using two halves, it is not necessary that the two halves, together, comprise 100% of the whole of the molecule from which they were derived. In certain embodiments, the split site is within a loop region of the DddA.

[0189] As used herein, reference to “splitting a DddA at a split site” embraces direct and indirect means for obtaining two half portions of a DddA. In one embodiment, splitting a DddA refers to the direct splitting a DddA polypeptide at a split site in the protein to obtain the DddA-N and DddA-C half portions. For example, the cleaving of a peptide bond between two adjacent amino acid residues at a split site may be achieved by enzymatic or chemical means. In another embodiment, a DddA may be split by engineering separate nucleic acid sequences, each encoding a different half portion of the DddA. Such methods can be used to obtain expression vectors for expressing the DddA half portions in a cell in order to reconstitute the DddA.

[0190] Exemplary split sites include G1333 and G1397. The nomenclature “G1333” refers to a split corresponding to the peptide bond between residues 1333 and 1334 of the canonical DddA protein. Similarly, “G1397” refers to a split corresponding to the peptide bond between residues 1397 and 1398. Thus, in reference to a DddA split at G1333, the N-terminal half of DddA would include the G residue. Similarly, in reference to a DddA split at G1397, the N-terminal half of DddA would include the G residue.

[0191] Given that the activity of canonical DddA has a cytidine deaminase activity, the base editor system involving split DddA domains (i.e., an N-terminal and a C-terminal half) each fused to a programmable binding domain that is programmed to bind to either side of a target site of deamination (i.e., a target cytidine), can be referred to as a “DdCBE” or double-stranded DNA cytidine base editor. Alternatively, the base editors disclosed herein may be referred to as evolved DddA-containing base editors because they comprise evolved DddA domains.

### Subject

[0192] The term “subject,” as used herein, refers to an individual organism, for example, an individual mammal. In some embodiments, the subject is a human. In some embodiments, the subject is a non-human mammal. In some embodiments, the subject is a non-human primate. In some embodiments, the subject is a rodent. In some embodiments, the subject is a sheep, a goat, a cattle, a cat, or a dog. In some embodiments, the subject is a vertebrate, an amphibian, a reptile, a fish, an insect, a fly, or a nematode. In some embodiments, the subject is a research animal. In some embodiments, the subject is genetically engineered, e.g., a genetically engineered non-human subject. The subject may be of either sex and at any stage of development.

### Target Site

[0193] The term “target site” refers to a sequence within a nucleic acid molecule (e.g., a mtDNA) that is edited by an evolved DddA-containing base editor disclosed herein. The target site further refers to the sequence within a nucleic acid molecule to which a complex of the evolved-DddA containing base editor binds. In cases wherein the pDNAbp of the evolved-DddA containing base editor is a Cas9 domain, typically, the target site is a sequence that includes the unique ˜20 bp target specified by the gRNA plus the genomic PAM sequence. CRISPR-Cas9 mechanisms recognize DNA targets that are complementary to a short CRISPR sgRNA sequence. The part of the sgRNA sequence that is complementary to the target sequence is known as a protospacer. In order for Cas9 to function it also requires a specific protospacer adjacent motif (PAM) that varies depending on the bacterial species of the Cas9 gene. The most commonly used Cas9 nuclease, derived from S. pyogenes, recognizes a PAM sequence of NGG that is found directly downstream of the target sequence in the genomic DNA, on the non-target strand.

### Treatment

[0194] The terms “treatment,” “treat,” and “treating,” refer to a clinical intervention aimed to reverse, alleviate, delay the onset of, or inhibit the progress of a disease or disorder, or one or more symptoms thereof, as described herein. As used herein, the terms “treatment,” “treat,” and “treating” refer to a clinical intervention aimed to reverse, alleviate, delay the onset of, or inhibit the progress of a disease or disorder, or one or more symptoms thereof, as described herein. In some embodiments, treatment may be administered after one or more symptoms have developed and/or after a disease has been diagnosed. In other embodiments, treatment may be administered in the absence of symptoms, e.g., to prevent or delay onset of a symptom or inhibit onset or progression of a disease. For example, treatment may be administered to a susceptible individual prior to the onset of symptoms (e.g., in light of a history of symptoms and/or in light of genetic or other susceptibility factors). Treatment may also be continued after symptoms have resolved, for example, to prevent or delay their recurrence.

### Uracil Glycosylase Inhibitor

[0195] The term “uracil glycosylase inhibitor” or “UGI,” as used herein, refers to a protein that is capable of inhibiting a uracil-DNA glycosylase base-excision repair enzyme. In some embodiments, a UGI domain comprises a wild-type UGI or a UGI as set forth in SEQ ID NO: 377. In some embodiments, the UGI proteins provided herein include fragments of UGI and proteins homologous to a UGI or a UGI fragment. For example, in some embodiments, a UGI domain comprises a fragment of the amino acid sequence set forth in SEQ ID NO: 377. In some embodiments, a UGI fragment comprises an amino acid sequence that comprises at least 60%, at least 65%, at least 70%, at least 75%, at least 80%, at least 85%, at least 90%, at least 95%, at least 96%, at least 97%, at least 98%, at least 99%, or at least 99.5% of the amino acid sequence as set forth in SEQ ID NO: 377. In some embodiments, a UGI comprises an amino acid sequence homologous to the amino acid sequence set forth in SEQ ID NO: 377, or an amino acid sequence homologous to a fragment of the amino acid sequence set forth in SEQ ID NO: 377. In some embodiments, proteins comprising UGI or fragments of UGI or homologs of UGI or UGI fragments are referred to as “UGI variants.” A UGI variant shares homology to UGI, or a fragment thereof. For example, a UGI variant is at least 70% identical, at least 75% identical, at least 80% identical, at least 85% identical, at least 90% identical, at least 95% identical, at least 96% identical, at least 97% identical, at least 98% identical, at least 99% identical, at least 99.5% identical, or at least 99.9% identical to a wild type UGI or a UGI as set forth in SEQ ID NO: 377. In some embodiments, the UGI variant comprises a fragment of UGI, such that the fragment is at least 70% identical, at least 80% identical, at least 90% identical, at least 95% identical, at least 96% identical, at least 97% identical, at least 98% identical, at least 99% identical, at least 99.5% identical, or at least 99.9% to the corresponding fragment of wild-type UGI or a UGI as set forth in SEQ ID NO: 377. In some embodiments, the UGI comprises the following amino acid sequence: MTNLSDIIEKETGKQLVIQESILMLPEEVEEVIGNKPESDILVHTAYDESTDENVMLLTSDAPE YKPWALVIQDSNGENKIKML (SEQ ID NO: 377) (P147391UNGI_BPPB2 Uracil-DNA glycosylase inhibitor), or the same sequence but without the N-terminal methionine.

[0196] Other UGI proteins may include those described in Example 6, as follows:

| UGI | Sequence | SEQ ID NO: |
|---|---|---|
| Canonical UGI | TNLSDIIEKETGKQLVIQESILMLPEEVEEVIGNKPESDIVHTAYDES | 378 |
| | TDENVMLLTSDAPEYKPWALVIQDSNGENKIKML | |
| UGI2 | MTLELQLKHYITNLFNLPKDEKWHCESIEEIADDILPDQYVRLGALS | 379 |
| | NKILQTYTYYSDTLHESNIYPFILYYQKQLIAIGYIDENHDMDFLYLH | |
| | NTIMPLLDQRYLLTGGQ | |
| UGI3 | MNKNFDEVKADLRTVTGKKIEFKERLKNILRVQMNQLGFEDSYMIQ | 380 |
| | VQVSSDQEEWVECHENMSLSDFEVMYGNISGEIKRMTVVKYEEANI | |
| | EKLVELKFEYEYAKAHQEYIRAYTKLMSNTLYGRKPSL | |
| UGI5 | MNEEKMHYRDAIKEVELTMMSLDSHFRTHKEFTDSYLLVLILEDVV | 381 |
| | GETRVEVSEGLTFDEASYIIGGTSDNILNMHMINYCEKNREEIYKWL | |
| | KVSRVNTFKSNYAKMLLNTAYGKDLLKGVVK | |
| UGI7 | MNNHFMSIGRNCSKCNNVRLNEDFSKSEEICNECFDKEERFVDSYTL | 382 |
| | IYITEDETGKRFEAILENQTIEETEIIYGNIIDKIIVWNVILTM | |
| UGI12 | DGNEHWEVHPGLSLSDFEVVYGNNPHQIVKLRLDKEVGGSGGSMV | 383 |
| | QNDFIDSYTLCWLLRDDSGGGGSMVQNDFIDSYTLCWLLRDDDGN | |
| | EHWEVHPGLSLSDFEVVYGNNPHQIVKLRLDKEV | |

### Variant

[0197] In various embodiments, the evolved DddA-containing base editors or the polypeptides that comprise the evolved DddA-containing base editors (e.g., the pDNAbps and DddA) may be engineered as variants.

[0198] As used herein, the term “variant” refers to a protein having characteristics that deviate from what occurs in nature that retains at least one functional i.e. binding, interaction, or enzymatic ability and/or therapeutic property thereof. A “variant” is at least about 70% identical, at least about 80% identical, at least about 90% identical, at least about 95% identical, at least about 96% identical, at least about 97% identical, at least about 98% identical, at least about 99% identical, at least about 99.5% identical, or at least about 99.9% identical to the wild type protein. For instance, a variant of Cas9 may comprise a Cas9 that has one or more changes in amino acid residues as compared to a wild type Cas9 amino acid sequence. As another example, a variant of a deaminase may comprise a deaminase that has one or more changes in amino acid residues as compared to a wild type deaminase amino acid sequence, e.g. following ancestral sequence reconstruction of the deaminase. These changes include chemical modifications, including substitutions of different amino acid residues truncations, covalent additions (e.g. of a tag), and any other mutations. The term also encompasses circular permutants, mutants, truncations, or domains of a reference sequence, and which display the same or substantially the same functional activity or activities as the reference sequence. This term also embraces fragments of a wild type protein.

[0199] The level or degree of which the property is retained may be reduced relative to the wild type protein but is typically the same or similar in kind. Generally, variants are overall very similar, and in many regions, identical to the amino acid sequence of the protein described herein. A skilled artisan will appreciate how to make and use variants that maintain all, or at least some, of a functional ability or property.

[0200] The variant proteins may comprise, or alternatively consist of, an amino acid sequence which is at least 80%, 85%, 90%, 95%, 96%, 97%, 98%, 99%, or 100%, identical to, for example, the amino acid sequence of a wild-type protein, or any protein provided herein (e.g. DddA).

[0201] By a polypeptide having an amino acid sequence at least, for example, 95% “identical” to a query amino acid sequence, it is intended that the amino acid sequence of the subject polypeptide is identical to the query sequence except that the subject polypeptide sequence may include up to five amino acid alterations per each 100 amino acids of the query amino acid sequence. In other words, to obtain a polypeptide having an amino acid sequence at least 95% identical to a query amino acid sequence, up to 5% of the amino acid residues in the subject sequence may be inserted, deleted, or substituted with another amino acid. These alterations of the reference sequence may occur at the amino- or carboxy-terminal positions of the reference amino acid sequence or anywhere between those terminal positions, interspersed either individually among residues in the reference sequence or in one or more contiguous groups within the reference sequence.

[0202] As a practical matter, whether any particular polypeptide is at least 80%, 85%, 90%, 95%, 96%, 97%, 98%, or 99% identical to, for instance, the amino acid sequence of a protein such as a DddA protein, can be determined conventionally using known computer programs. A preferred method for determining the best overall match between a query sequence (a sequence of the present invention) and a subject sequence, also referred to as a global sequence alignment, can be determined using the FASTDB computer program based on the algorithm of Brutlag et al. (Comp. App. Biosci. 6:237-245 (1990)). In a sequence alignment the query and subject sequences are either both nucleotide sequences or both amino acid sequences. The result of said global sequence alignment is expressed as percent identity. Preferred parameters used in a FASTDB amino acid alignment are: Matrix=PAM 0, k-tuple=2, Mismatch Penalty=1, Joining Penalty=20, Randomization Group Length=0, Cutoff Score=1, Window Size=sequence length, Gap Penalty=5, Gap Size Penalty=0.05, Window Size=500 or the length of the subject amino acid sequence, whichever is shorter.

[0203] If the subject sequence is shorter than the query sequence due to N- or C-terminal deletions, not because of internal deletions, a manual correction must be made to the results. This is because the FASTDB program does not account for N- and C-terminal truncations of the subject sequence when calculating global percent identity. For subject sequences truncated at the N- and C-termini, relative to the query sequence, the percent identity is corrected by calculating the number of residues of the query sequence that are N- and C-terminal of the subject sequence, which are not matched/aligned with a corresponding subject residue, as a percent of the total bases of the query sequence. Whether a residue is matched/aligned is determined by results of the FASTDB sequence alignment. This percentage is then subtracted from the percent identity, calculated by the above FASTDB program using the specified parameters, to arrive at a final percent identity score. This final percent identity score is what is used for the purposes of the present invention. Only residues to the N- and C-termini of the subject sequence, which are not matched/aligned with the query sequence, are considered for the purposes of manually adjusting the percent identity score. That is, only query residue positions outside the farthest N- and C-terminal residues of the subject sequence.

### Vector

[0204] The term “vector,” as used herein, refers to a nucleic acid that can be modified to encode a gene of interest and that is able to enter into a host cell, mutate and replicate within the host cell, and then transfer a replicated form of the vector into another host cell. Exemplary suitable vectors include viral vectors, such as retroviral vectors or bacteriophages and filamentous phage, and conjugative plasmids. Additional suitable vectors will be apparent to those of skill in the art based on the instant disclosure.

### Wild Type

[0205] As used herein the term “wild type” is a term of the art understood by skilled persons and means the typical form of an organism, strain, gene or characteristic as it occurs in nature as distinguished from mutant or variant forms.

[0206] These and other exemplary embodiments are described in more detail in the Detailed Description, Examples, and claims. The invention is not intended to be limited in any manner by the above exemplary embodiments.

### DETAILED DESCRIPTION OF CERTAIN EMBODIMENTS

[0207] Each mammalian cell contains hundreds to thousands of copies of a circular mtDNA¹⁰. Homoplasmy refers to a state in which all mtDNA molecules are identical, while heteroplasmy refers to a state in which a cell contains a mixture of wild-type and mutant mtDNA. Current approaches to engineer mtDNA rely on DNA-binding proteins such as transcription activator-like effectors nucleases (mitoTALENs)¹¹⁻¹⁷ and zinc finger nucleases (mitoZFNs)¹⁸⁻²⁰ fused to mitochondrial targeting sequences to induce double-strand breaks (DSBs). Such proteins do not rely on nucleic acid programmability (e.g., such as with Cas9 domains). Linearized mtDNA is rapidly degraded,²¹⁻²³ resulting in heteroplasmic shifts to favor uncut mtDNA genomes. As a candidate therapy however, this approach cannot be applied to homoplasmic mtDNA mutations²⁴ since destroying all mtDNA copies is presumed to be harmful.^{22,25} In addition, using DSBs to eliminate heteroplasmic mtDNA mutations, which tend to be functionally recessive,²⁶ implicitly requires the edited cell to restore its wild-type mtDNA copy number. During this transient period of mtDNA repopulation, the loss of mtDNA copies could result in cellular toxicity.

[0208] The present disclosure is further to the inventors' discovery of a double-stranded DNA cytidine deaminase, referred to herein as “DddA,” and to its application in base editing of double-stranded nucleic acid molecules, and in particular, the editing of mitochondrial DNA, as described in Mok et al., “A bacterial cytidine deaminase toxin enables CRISPR-free mitochondrial base editing,” Nature, 2020; 583(7817): 631-637 (“Mok et al., 2020”), the entire contents of which are incorporated herein by reference. As depicted in FIG. 1A, the full-length naturally occurring DddA protein is toxic to cells. Without being bound by theory, this cellular toxicity may relate to the fact that the substrate of DddA is any double stranded DNA, including the chromosomal DNA. Thus, as described in Mok et al., the inventors found that the protein could be engineered into split DddA halves that are non-toxic to the cell and inactive on their own until brought together on a target DNA by adjacently bound programmable DNA-binding proteins (e.g., mitoTALE proteins, zinc finger proteins, or Cas9/sgRNA complexes) which bind to the DNA on either side of a site of deamination. The inventors proposed split sites within amino acid loop regions as identified by the crystal structure of DddA. They found that fusions of the split-DddA halves had the ability to deaminate double stranded DNA as a substrate when brought together at a site of deamination by a pair of programmable DNA binding proteins binding to different sites at a deamination site (or edit site).

[0209] As now disclosed herein, the inventors have used continuous evolution methods, e.g., phage-assisted non-continuous evolution (PANCE) and phage-assisted continuous evolution (PACE), for example, as illustrated in FIG. 2, to evolve a starting point DddA protein or fragment thereof to form an evolved variant DddA or evolved fragment of DddA having one or more improved characteristics, including increase deaminase activity and/or expanded sequence contexts in which deamination may occur.

[0210] The present disclosure provides methods for making such DddA variants, methods of making base editors comprising said variants, base editors comprising fusion proteins of an evolved variant DddA and a programmable DNA binding protein (e.g., a mitoTALE, zinc finger, or napDNAbp), the variant DddA proteins themselves, DNA vectors encoding said base editors, methods for delivery said based editors to cells, and methods for using said base editors to edit a target double stranded DNA molecule, including a mitochondrial genome.

[0211] FIG. 1A is a schematic representation of a naturally occurring DddA, an interbacterial toxin discovered by the inventors which was found to catalyze deamination of cytidines within double-stranded DNA as a substrate. The inventors are believed to be the first to identify such a deaminase. However, in its naturally occurring form, the inventors discovered that DddA is toxic to cells. The inventors have conceived of the idea of using the DddA in the context of base editing to deaminate a nucleobase at a target edit site.

[0212] In the context of base editing, all previously described cytidine deaminases utilize single-stranded DNA as a substrate (e.g., the R-loop region of a Cas9-gRNA/dsDNA complex). Base editing in the context of mitochondrial DNA has not heretofore been possible due to the challenges of introducing and/or expressing the gRNA needed for a Cas9-based system into mitochondria. The inventors have recognized for the first time that the catalytic properties of DddA can be leveraged to conduct base editing directly on a double strand DNA substrate by separating the DddA into inactive portions, which when co-localized within a cell will become reconstituted as an active DddA. This avoids or at least minimizes the toxicity associated with delivering and/or expressing a fully active DddA in a cell.

[0213] For example, a DddA may be divided into two fragments at a “split site,” i.e., a peptide bond between two adjacent residues in the primary structure or sequence of a DddA. The split site may be positioned anywhere along the length of the DddA amino acid sequence, so long as the resulting fragments do not on their own possess a toxic property (which could be a complete or partial deaminase activity). In certain embodiments, the split site is located in a loop region of the DddA protein. In the embodiment shown in FIG. 1A, the arrows depict five possible split sites approximately equally spaced along the length of the DddA protein. The depicted embodiment further shows that the DddA was divided into two fragments at a split site located approximately in the middle of the DddA amino acid sequence. The DddA fragment lying to the left of the split site may be referred to as the “N-terminal DddA half” and the DddA fragment lying to the right of the split site may be referred to as the “C-terminal DddA half.” FIG. 1A identifies these fragments as “DddA half^{A}” and DddA half^{B}”, respectively. Depending on the location of the split site, the N-terminal DddA half and the C-terminal DddA half could be the same size, approximately the same size, or very different sizes.

[0214] Accordingly, this disclosure provides compositions, kits, and methods of modifying double-stranded DNA (e.g., mitochondrial DNA or “mtDNA”) using genome editing strategies that comprise the use of a programmable DNA binding protein (“pDNAbp”) (e.g., a mitoTALE, mitoZFP, or a CRISPR/Cas9) and a double-stranded DNA deaminase (“DddA”) to precisely install nucleotide changes and/or correct pathogenic mutations in double-stranded DNA (e.g., mtDNA), rather than destroying the DNA (e.g., mtDNA) with double-strand breaks (DSBs). The present disclosure provides pDNAbp polypeptides, DddA polypeptides, fusion proteins comprising pDNAbp polypeptides and DddA polypeptides, nucleic acid molecules encoding the pDNAbp polypeptides, DddA polypeptides, and fusion proteins described herein, expression vectors comprising the nucleic acid molecules described herein, cells comprising the nucleic acid molecules, expression vectors, pDNAbp polypeptides, DddA polypeptides, and/or fusion proteins described herein, pharmaceutical compositions comprising the polypeptides, fusion proteins, nucleic acid molecules, vectors, or cells described herein, and kits comprising the polypeptides, fusion proteins, nucleic acid molecules, vectors, or cells described herein for modifying double-stranded DNA (e.g., mtDNA) by base editing.

[0215] Mitochondrial diseases (e.g., MELAS/Leigh syndrome and Leber's hereditary optic neuropathy) are diseases often resulting from errors or mutations in the mitochondrial DNA (mtDNA). In many cases, the mutated mtDNA co-exists with the wild-type mtDNA (mtDNA heteroplasmy). In such instances, residual wild type mtDNA can partially compensate for the mutation before biochemical and clinical manifestations occur. Multiple approaches to reduce the levels of mutant mtDNA have been tried. None of these approaches, however, have been successful in treating or correcting these abnormalities. The present disclosure, including the disclosed DddA/pDNAbp fusion proteins, nucleic acid molecules and vectors encoding same can be used to treat one or more mitochondrial diseases, which can include, but are not limited to: Alper's Disease, Autosomal Dominant Optic Atrophy (ADOA), Barth Syndrome, Carnitine Deficiency, Chronic Progressive External Ophthalmoplegia (CPEO), Co-Enzyme Q10 Deficiency, Creatine Deficiency Syndrome, Fatty Acid Oxidation Disorders, Friedreich's Ataxia, Kearns-Sayre Syndrome (KSS), Lactic Acidosis, Leber Hereditary Optic Neuropathy (LHON), Leigh Syndrome, MELAS, Mitochondrial Myopathy, Multiple Mitochondrial Dysfunction Syndrome, Primary Mitochondrial Myopathy, and TK2d, among others.

[0216] The present disclosure addresses many of the shortcomings of the existing technologies with a new precision mtDNA editing fusion protein and technique. The proposed technology permits the editing (e.g., deamination) of single, or multiple, nucleotides in the mtDNA allowing for the correction or modification of the nucleotide, and by extension the codon in which it is contained. In various embodiment, however, the present disclosure is not limited to editing mtDNA, but may also be used to target the editing of any double-stranded DNA in the cell, including the genomic DNA in the nucleus.

### I. Evolved DddA Variants

[0217] In various embodiments, the Evolved DddA-containing base editors or the polypeptides that comprise the Evolved DddA-containing base editors (e.g., the pDNAbps and DddA) may be engineered to include any variant of any DddA, or an inactive fragment thereof. In certain embodiments, the DddA variant may be obtained through a continuous evolution process, such as PACE. The term “phage-assisted continuous evolution (PACE),” as used herein, refers to continuous evolution that employs phage as viral vectors and is described in Thuronyi, B. W. et al. Nat Biotechnol 37, 1070-1079 (2019), the contents of which are incorporated herein by reference in their entirety. The general concept of PACE technology has also been described, for example, in International PCT Application, PCT/US2009/056194, filed Sep. 8, 2009, published as WO 2010/028347 on Mar. 11, 2010; International PCT Application, PCT/US2011/066747, filed Dec. 22, 2011, published as WO 2012/088381 on Jun. 28, 2012; U.S. Application, U.S. Pat. No. 9,023,594, issued May 5, 2015, International PCT Application, PCT/US2015/012022, filed Jan. 20, 2015, published as WO 2015/134121 on Sep. 11, 2015, and International PCT Application, PCT/US2016/027795, filed Apr. 15, 2016, published as WO 2016/168631 on Oct. 20, 2016, the entire contents of each of which are incorporated herein by reference. PACE can be used, for instance, to evolve a deaminase (e.g., a cytidine or adenosine deaminase) which uses single strand DNA as a substrate to obtain a deaminase which is capable of using double-strand DNA as a substrate (e.g., DddA).

[0218] In various embodiments involving obtaining a DddA variant by way of one or more mutagenesis methodologies, such as, but not limited to a continuous evolution process (e.g., PACE), the process may begin with a “starter” protein, such as canonical DddA or a fragment of DddA, such as DddAtox, which corresponds to the N-terminal portion of canonical DddA.

[0219] In various embodiments, the starter DddA protein from which variants are derived can be the canonical protein, or a fragment there. As reported in Mok et al. 2020, the DddA was discovered in Burkholderia cenocepia and reported in the Protein Data Bank as PDB ID: 6U08, which has the following full-length amino acid sequence (1427 amino acids):

>tr|A0A1V6L4E7|A0A1V6L4E7_9BURK YD repeat (Two copies) OS = Burkholderia
cenocepacia OX = 95486 GN = UE95_03830 PE = 1 SV = 1
(SEQ ID NO: 16)
MYEAARVTDPIDHTSALAGFLVGAVLGIALIAAVAFATFTCGFGVALLAGMMAGIGAQALLSIGESIG
KMFSSQSGNIITGSPDVYVNSLSAAYATLSGVACSKHNPIPLVAQGSTNIFINGRPAARKDDKITCGATI
GDGSHDTFFHGGTQTYLPVDDEVPPWLRTATDWAFTLAGLVGGLGGLLKASGGLSRAVLPCAAKFIG
GYVLGEAFGRYVAGPAINKAIGGLFGNPIDVTTGRKILLAESETDYVIPSPLPVAIKRFYSSGIDYAGTL
GRGWVLPWEIRLHARDGRLWYTDAQGRESGFPMLRAGQAAFSEADQRYLTRTPDGRYILHDLGERY
YDFGQYDPESGRIAWVRRVEDQAGQWYQFERDSRGRVTEILTCGGLRAVLDYETVFGRLGTVTLVH
EDERRLAVTYGYDENGQLASVTDANGAVVRQFAYTNGLMTSHMNALGFTSSYVWSKIEGEPRVVET
HTSEGENWTFEYDVAGRQTRVRHADGRTAHWRFDAQSQIVEYTDLDGAFYRIKYDAVGMPVMLML
PGDRTVMFEYDDAGRIIAETDPLGRTTRTRYDGNSLRPVEVVGPDGGAWRVEYDQQGRVVSNQDSL
GRENRYEYPKALTALPSAHIDALGGRKTLEWNSLGKLVGYTDCSGKTTRTSFDAFGRICSRENALGQR
ITYDVRPTGEPRRVTYPDGSSETFEYDAAGTLVRYIGLGGRVQELLRNARGQLIEAVDPAGRRVQYRY
DVEGRLRELQQDHARYTFTYSAGGRLLTETRPDGILRRFEYGEAGELLGLDIVGAPDPHATGNRSVRT
IRFERDRMGVLKVQRTPTEVTRYQHDKGDRLVKVERVPTPSGIALGIVPDAVEFEYDKGGRLVAEHG
SNGSVIYTLDELDNVVSLGLPHDQTLQMLRYGSGHVHQIRFGDQVVADFERDDLHREVSRTQGRLTQ
RSGYDPLGRKVWQSAGIDPEMLGRGSGQLWRNYGYDAAGDLIETSDSLRGSTRFSYDPAGRLISRAN
PLDRKFEEFAWDAAGNLLDDAQRKSRGYVEGNRLLMWQDLRFEYDPFGNLATKRRGANQTQRFTY
DGQDRLITVHTQDVRGVVETRFAYDPLGRRIAKTDTAFDLRGMKLRAETKRFVWEGLRLVQEVRET
GVSSYVYSPDAPYSPVARADTVMAEALAATVIDSAKRAARIFHFHTDPVGAPQEVTDEAGEVAWAG
QYAAWGKVEATNRGVTAARTDQPLRFAGQYADDSTGLHYNTFRFYDPDVGRFINQDPIGLNGGANV
YHYAPNPVGWVDPWGLAGSYALGPYQISAPQLPAYNGQTVGTFYYVNDAGGLESKVFSSGGPTPYP
NYANAGHVEGQSALFMRDNGISEGLVFHNNPEGTCGFCVNMTETLLPENAKMTVVPPEGAIPVKRGA
TGETKVFTGNSNSPKSPTKGGC.

[0220] In various other embodiments, the starter protein can be a DddA fragment. For instance, a starter DddA protein can be a DddA fragment having the following amino acid sequence:

(SEQ ID NO: 25)
GSYALGPYQISAPQLPAYNGQTVGTFYYVNDAGGLESKVFSSGGPTPYP
NYANAGHVEGQSALFMRDNGISEGLVFHNNPEGTCGFCVNMTETLLPEN
AKMTVVPPEGAIPVKRGATGETKVFTGNSNSPKSPTKGGC,

or an amino acid sequence having at least 70%, at least 75%, at least 80%, at least 85%, at least 90%, at least 95%, at least 96%, at least 97%, at least 98%, at least 99%, or 100% sequence identify with DddA of SEQ ID NO: 25, or a fragment thereof.

[0221] In other embodiments, the DddA has the following amino acid sequence:

(SEQ ID NO: 26)
XGSSHHHHHHSQDPIGLNGGANVYHYAPNPVGWVDPWGLAGSYALGPYQ
ISAPQLPAYNGQTVGTFYYVNDAGGLESKVFSSGGPTPYPNYANAGHVE
GQSALFXRDNGISEGLVFHNNPEGTCGFCVNXTETLLPENAKXTVVPPE
GAIPVKRGATGETKVFTGNSNSPKSPTKGGC

(which corresponds to the N-terminal portion of canonical DddA of PDB Accession No. 6U08_A of Burkholderia cenocepacia and includes a HisTag sequence), and can include fragments or variants thereof, including amino acid sequences having at least 70%, at least 75%, at least 80%, at least 85%, at least 90%, at least 95%, at least 96%, at least 97%, at least 98%, at least 99%, or 100% sequence identify with SEQ ID NO: 26.

[0222] In various other embodiments, the starter DddA protein can be a split DddA can have the following sequences:

### G1333 DddAtox-N¬

[0223] GSYALGPYQISAPQLPAYNGQTVGTFYYVNDAGGLESKVFSSGG (SEQ ID NO: 338), and can include fragments or variants thereof, including amino acid sequences having at least 70%, at least 75%, at least 80%, at least 85%, at least 90%, at least 95%, at least 96%, at least 97%, at least 98%, at least 99%, or 100% sequence identify with DddA of SEQ ID NO: 338.

### G1333 DddAtox-C

[0224] PTPYPNYANAGHVEGQSALFMRDNGISEGLVFHNNPEGTCGFCVNMTETLLPENAKMTVVP PEGAIPVKRGATGETKVFTGNSNSPKSPTKGGC (SEQ ID NO: 339), and can include fragments or variants thereof, including amino acid sequences having at least 70%, at least 75%, at least 80%, at least 85%, at least 90%, at least 95%, at least 96%, at least 97%, at least 98%, at least 99%, or 100% sequence identify with DddA of SEQ ID NO: 339.

### G1397 DddAtox-N¬

[0225] GSYALGPYQISAPQLPAYNGQTVGTFYYVNDAGGLESKVFSSGGPTPYPNYANAGHVEGQS ALFMRDNGISEGLVFHNNPEGTCGFCVNMTETLLPENAKMTVVPPEG (SEQ ID NO: 340), and can include fragments or variants thereof, including amino acid sequences having at least 70%, at least 75%, at least 80%, at least 85%, at least 90%, at least 95%, at least 96%, at least 97%, at least 98%, at least 99%, or 100% sequence identify with DddA of SEQ ID NO: 340.

### G1397 DddAtox-C

[0226] AIPVKRGATGETKVFTGNSNSPKSPTKGGC (SEQ ID NO: 341), and can include fragments or variants thereof, including amino acid sequences having at least 70%, at least 75%, at least 80%, at least 85%, at least 90%, at least 95%, at least 96%, at least 97%, at least 98%, at least 99%, or 100% sequence identify with DddA of SEQ ID NO: 341.

### Split DddA (DddA-G1397N)

[0227] GSYALGPYQISAPQLPAYNGQTVGTFYYVNDAGGLESKVFSSGGPTPYPNYANAGHVEGQS ALFMRDNGISEGLVFHNNPEGTCGFCVNMTETLLPENAKMTVVPPEG (SEQ ID NO: 340), and can include fragments or variants thereof, including amino acid sequences having at least 70%, at least 75%, at least 80%, at least 85%, at least 90%, at least 95%, at least 96%, at least 97%, at least 98%, at least 99%, or 100% sequence identify with DddA of SEQ ID NO: 340.

### Split DddA (DddA-G1397C)

[0228] AIPVKRGATGETKVFTGNSNSPKSPTKGGC (SEQ ID NO: 341).

[0229] The disclosure also contemplates the use of any variant of DddAtox, or proteins comprising an amino acid sequence having at least 70%, at least 75%, at least 80%, at least 85%, at least 90%, at least 95%, at least 96%, at least 97%, at least 98%, at least 99%, or 100% sequence identify with DddA-G1397C, or a biologically active fragment of DddA-G1397C.

[0230] As shown in FIG. 1A, the present inventors have recognized that the whole, intact DddA is toxic to cells. Thus, in order to utilize the DddA in the context of the Evolved DddA-containing base editors described herein, the DddA must be delivered in an inactive form. One of ordinary skill in the art will appreciate that various methods, techniques, and modification known in the art can be adapted for reversibly inactivating DddA such that the enzyme may be delivered to a cell in an inactive state, but then become activated inside the cell (or the mitochondria) under one or more conditions, or in the presence of one or more inducing agents, in order to conduct the desired deamination.

[0231] In preferred embodiments, as depicted in FIGS. 1A-1F, the DddA may be split into inactive fragments which can be separately delivered to a target deamination site on separate fusion constructs that target each fragment of the DddA to sites positioned on either side of a target edit site.

[0232] In some embodiments, the DddA comprises a first portion and a second portion. In some embodiments, the first portion and the second portion together comprise a full length DddA. In some embodiments, the first and second portion comprise less than the full length DddA portion. In some embodiments, the first and second portion independently do not have any, or have minimal, native DddA activity (e.g., deamination activity). In some embodiment, the first and second portion can re-assemble (i.e., dimerize) into a DddA protein with, at least partial, native DddA activity (e.g., deamination activity).

[0233] In some embodiments, the first and second portion of the DddA are formed by truncating (i.e., dividing or splitting the DddA protein) at specified amino acid residues. In some embodiments, the first portion of a DddA comprises a full-length DddA truncated at its N-terminus. In some embodiments, the second portion of a DddA comprises a full-length DddA truncated at its C-terminus. In some embodiments, additional truncations are performed to either the full-length DddA or to the first or second portions of the DddA. In some embodiments, the first and second portions of a DddA may comprise additional truncations, but which the first and second portion can dimerize or re-assemble, to restore, at least partially, native DddA activity (e.g., deamination). In some embodiments, the first and second portions comprise full-length DddA truncated at, or around, a residue in DddA selected from the group comprising: 62, 71, 73, 84, 94, 108, 110, 122, 135, 138, 148, and 155. In some embodiments, the truncation of DddA occurs at residue 148.

[0234] In certain embodiments, the DddA can be separated into two fragments by dividing the DddA at a split site. A “split site” refers to a position between two adjacent amino acids (in a wildtype DddA amino acid sequence) that marks a point of division of a DddA. In certain embodiments, the DddA can have a least one split site, such that once divided at that split site, the DddA forms an N-terminal fragment and a C-terminal fragment. The N-terminal and C-terminal fragments can be the same or difference sizes (or lengths), wherein the size and/or polypeptide length depends on the location or position of the split site. As used herein, reference to a “fragment” of DddA (or any other polypeptide) can be referred equivalently as a “portion.” Thus, a DddA which is divided at a split site can form an N-terminal portion and a C-terminal portion. Preferably, the N-terminal fragment (or portion) and the C-terminal fragment (or portion) or DddA do not have a deaminase activity.

[0235] In various embodiments, a DddA may be split into two or more inactive fragments by directly cleaving the DddA at one or more split sites. Direct cleaving can be carried out by a protease (e.g., trypsin) or other enzyme or chemical reagent. In certain embodiments, such chemical cleavage reactions can be designed to be site-selective (e.g., Elashal and Raj, “Site-selective chemical cleavage of peptide bonds,” Chemical Communications, 2016, Vol. 52, pages 6304-6307, the contents of which are incorporated herein by reference.) In other embodiments, chemical cleavage reactions can be designed to be non-selective and/or occur in a random fashion.

[0236] In other embodiments, the two or more inactive DddA fragments can be engineered as separately expressed polypeptides. For instance, for a DddA having one split site, the N-terminal DddA fragment could be engineered from a first nucleotide sequence that encodes the N-terminal DddA fragment (which extends from the N-terminus of the DddA up to and including the residue on the amino-terminal side of the split site). In such an example, the C-terminal DddA fragment could be engineered from a second nucleotide sequence that encodes the C-terminal DddA fragment (which extends from the carboxy-terminus of the split site up to including the natural C-terminus of the DddA protein). The first and second nucleotide sequences could be on the same or different nucleotide molecules (e.g., the same or different expression vectors).

[0237] In various embodiments, that N-terminal portion of the DddA may be referred to as “DddA-N half” and the C-terminal portion of the DddA may be referred to as the “DddA-C half.” Reference to the term “half” does not connote the requirement that the DddA-N and DddA-C portions are identically half of the size and/or sequence length of a complete DddA, or that the split site is required to be at the mid point of the complete DddA polypeptide. To the contrary, and as noted above, the split site can be between any pair of residues in the DddA polypeptide, thereby giving rise to half portions which are unequal in size and/or sequence length. In certain embodiments, the split site is within a loop region of the DddA.

[0238] Accordingly, in one aspect, the disclosure relates to a pair of fusion proteins useful for making modifications to the sequence of mitochondrial DNA (e.g., mtDNA). The pair of fusion proteins, in some embodiments, can comprise a first fusion protein comprising a first pDNAbp (e.g., a mitoTALE, mitoZFP, or a CRISPR/Cas9) and a first portion or fragment of a DddA, and a second fusion protein comprising a second pDNAbp (e.g., mitoTALE, mitoZFP, or a CRISPR/Cas9) and a second portion or fragment of a DddA, such that the first and the second portions of the DddA reconstitute a DddA upon co-localization in a cell and/or mitochondria. In certain embodiments, that first portion of the DddA is an N-terminal fragment of a DddA and the second portion of the DddA is C-terminal fragment of a DddA. In other embodiments, the first portion of the DddA is a C-terminal fragment of a DddA and the second portion of the DddA is an N-terminal fragment of a DddA. In this aspect, the structure of the pair of fusion proteins can be, for example:
[0239] [pDNAbp]-[DddA half^{A}] and [pDNAbp]-[DddA half^{B}];
[0240] [DddA-half^{A}]-[pDNAbp] and [DddA-half^{B}]-[pDNAbp];
[0241] [pDNAbp]-[DddA half^{A}] and [DddA-half^{B}]-[pDNAbp]; or
[0242] [DddA-half^{A}]-[pDNAbp] and [pDNAbp]-[DddA half^{B}], wherein “A” or “B” can be the N-terminal or C-terminal half of DddA.

[0243] In another aspect, the disclosure relates to a pair of fusion proteins useful for making modifications to the sequence of mitochondrial DNA (e.g., mtDNA). The pair of fusion proteins can comprise a first fusion protein comprising a first mitoTALE and a first portion or fragment of a DddA, and a second fusion protein comprising a second mitoTALE and a second portion or fragment of a DddA, such that the first and the second portions of the DddA, upon co-localization in a cell and/or mitochondria, are reconstituted an active DddA. In certain embodiments, that first portion of the DddA is an N-terminal fragment of a DddA and the second portion of the DddA is C-terminal fragment of a DddA. In other embodiments, the first portion of the DddA is a C-terminal fragment of a DddA and the second portion of the DddA is an N-terminal fragment of a DddA. In this aspect, the structure of the pair of fusion proteins can be, for example:
[0244] [mitoTALE]-[DddA half^{A}] and [mitoTALE]-[DddA half^{B}];
[0245] [DddA-half^{A}]-[pDNAbp] and [DddA-half^{B}]-[mitoTALE];
[0246] [mitoTALE]-[DddA half^{A}] and [DddA-half^{B}]-[mitoTALE]; or
[0247] [DddA-half^{A}]-[mitoTALE] and [mitoTALE]-[DddA half^{B}], wherein “A” or “B” can be the N-terminal or C-terminal half of DddA.

[0248] In yet another aspect, the disclosure relates to a pair of fusion proteins useful for making modifications to the sequence of mitochondrial DNA (e.g., mtDNA). The pair of fusion proteins can comprise a first fusion protein comprising a first mitoZFP and a first portion or fragment of a DddA, and a second fusion protein comprising a second mitoZFP and a second portion or fragment of a DddA, such that the first and the second portions of the DddA, upon co-localization in a cell and/or mitochondria, are reconstituted an active DddA. In certain embodiments, that first portion of the DddA is an N-terminal fragment of a DddA and the second portion of the DddA is C-terminal fragment of a DddA. In other embodiments, the first portion of the DddA is a C-terminal fragment of a DddA and the second portion of the DddA is an N-terminal fragment of a DddA. In this aspect, the structure of the pair of fusion proteins can be, for example:
[0249] [mitoZFP]-[DddA half^{A}] and [mitoZFP]-[DddA half^{B}];
[0250] [DddA-half^{A}]-[pDNAbp] and [DddA-half^{B}]-[mitoZFP];
[0251] [mitoZFP]-[DddA half^{A}] and [DddA-half^{B}]-[mitoZFP]; or
[0252] [DddA-half^{A}]-[mitoZFP] and [mitoZFP]-[DddA half^{B}], wherein “A” or “B” can be the N-terminal or C-terminal half of DddA.

[0253] In yet another aspect, the disclosure relates to a pair of fusion proteins useful for making modifications to the sequence of mitochondrial DNA (e.g., mtDNA). The pair of fusion proteins can comprise a first fusion protein comprising a first Cas9 and a first portion or fragment of a DddA, and a second fusion protein comprising a second Cas9 and a second portion or fragment of a DddA, such that the first and the second portions of the DddA, upon co-localization in a cell and/or mitochondria, are reconstituted an active DddA. In certain embodiments, that first portion of the DddA is an N-terminal fragment of a DddA (i.e., “DddA half^{A}” as shown in FIGS. 1A-1E) and the second portion of the DddA is C-terminal fragment of a DddA (i.e., “DddA half^{B}” as shown in FIGS. 1A-1E). In other embodiments, the first portion of the DddA is an C-terminal fragment of a DddA and the second portion of the DddA is an N-terminal fragment of a DddA. In this aspect, the structure of the pair of fusion proteins can be, for example:
[0254] [Cas9]-[DddA half^{A}] and [Cas9]-[DddA half^{B}];
[0255] [DddA-half^{A}]-[Cas9] and [DddA-half^{B}]-[Cas9];
[0256] [Cas9]-[DddA half^{A}] and [DddA-half^{B}]-[Cas9]; or
[0257] [DddA-half^{A}]-[Cas9] and [Cas9]-[DddA half^{B}], wherein “A” or “B” can be the N-terminal or C-terminal half of DddA.

[0258] In each instance above of “]-[” can be in reference to a linker sequence.

[0259] In some embodiments, a first fusion protein comprises, a first mitochondrial transcription activator-like effector (mitoTALE) domain and a first portion of a DNA deaminase effector (DddA).

[0260] In some embodiments, the first portion of the DddA comprises an N-terminal truncated DddA. In some embodiments, the first mitoTALE is configured to bind a first nucleic acid sequence proximal to a target nucleotide. In some embodiments, the first portion of a DddA is linked to the remainder of the first fusion protein by the C-terminus of the first portion of a DddA.

[0261] In one aspect, the present disclosure provides mitochondrial DNA editor fusion proteins for use in editing mitochondrial DNA. As used herein, these mitochondrial DNA editor fusion proteins may be referred to as “mtDNA editors” or “mtDNA editing systems.”

[0262] In various embodiments, the mtDNA editors described herein comprise (1) a programmable DNA binding protein (“pDNAbp”) (e.g., a mitoTALE domain, mitoZFP domain, or a CRISPR/Cas9 domain) and a double-stranded DNA deaminase domain, which is capable of carrying out a deamination of a nucleobase at a target site associated with the binding site of the programmable DNA binding protein (pDNAbp).

[0263] In some embodiments, the double-stranded DNA deaminase is split into two inactive half portions, with each half portion being fused to a programmable DNA binding protein that binds to a nucleotide sequence either upstream or downstream of a target edit site, and wherein once in the mitochondria, the two half portions (i.e., the N-terminal half and the C-terminal half) reassociate at the target edit site by the co-localization of the programmable DNA binding proteins to binding sites upstream and downstream of the target edit site to be acted on by the DNA deaminase. The reassociation of the two half portions of the double-stranded DNA deaminase restores the deaminase activity at the target edit site. In other embodiments, the double-stranded DNA deaminase can initially be set in an inactive state which can be induced when in the mitochondria. The double-stranded DNA deaminase is preferably delivered initially in an inactive form in order to avoid toxicity inherent with the protein. Any means to regulate the toxic properties of the double-stranded DNA deaminase until such time as the activity is desired to be activated (e.g., in the mitochondria) is contemplated.

[0264] In various embodiments, the following exemplary DddA enzymes, or variants thereof, can be used with the Evolved DddA-containing base editors described herein, or a sequence (amino acid or nucleotide as the case may be) having at least 70%, 75%, 80%, 85%, 90%, 95%, or 99% sequence identity with an one of the following DddA sequences:

| DddA Description | DddA amino acid and/or nucleotide sequence |
|---|---|
| DddA homolog in | >ATF83755.1 hypothetical protein CO712_00910 [Burkholderia gladioli |
| Burkholderia | pv. gladioli] |
| gladioli | MYEAARVTDPIEHTSALAGFLVGAVLGIALIAAVAFATFTCGFGVALLAGMAAGIGAQ |
| PROTEIN | VLLSLGESIGKMFSSQSGAITLGSPNVYVNGKQAAYATLSSVTCSKHNPTPLVAQGST |
| | NIFINGKPAARKDDKITCGAAISDGSHDTYFHGGIQTCLPIDDEVPPWLRTATDWAFAL |
| | AGLVGGLGGLLKEAGGLSHAVMPCAAKFIGGYVLGEAASRYVIGPAINSAIGGMFGN |
| | PVDVTTGRKILPAESETDYVVPSPMPVAIRRFYSSDLDYVGTLGRGWVLPWELRLHAR |
| | DGRLWYTDAQGRESGFPILKPGQAAFSEADQRYLTCTPDGRYILHDVGETYYDFGRY |
| | EPGSGRIGWVRRIEDQAGQWCQFERDSRGRVREIQTCGGLLAVLDYEPEHERLAEVSL |
| | VSGDQRRLVVAYGYDENGQMASVTDANGAVVRRFTYADGRMTSHSNALGFTSGYT |
| | WKVIDGTPRVVATHTSEGEAWAFEYDIEGRRTHVRHADGRHAQWRYDAQFQIVEYL |
| | DFDGRRYGLKYNAAGMPVMLTLPGERTVMFEYDDAGRIVAETDPLGRTTKTRYDGN |
| | SMRPVEIILPDGSAWHAEYDRQGRLLVTRDPLDRENRYEYPEALSALPVAHVDALGG |
| | RKTFEWNRLGELVAYTDCSGKTTRNFFDAFGLPLARENALGHRVSFDLRPTGETRRVT |
| | YPDGSSESYEYDAAGLMIRHIGLGGRMQTLQRNARGQLVEAVDPAGRRTRYHYDAE |
| | GRLRELQQAHARYAFAYSAGGRLVSETRPDGVLRRFEYGEAGDLAALEIVGTADDCA |
| | PNDRPVRAIRFERDRMGNLCVQHTPTEVTRYERDAGGRLLEVASVPTAAGLALGIAPD |
| | TLTFEYDKAGRLSAEHGANGSVQYTLDALDNVLKLALPHEQTLQMLRYGSGHVHQIR |
| | HGDQVVSDFERDDLHRELTRTQGPLTERTAYDLLGRKIWQSAGFQPDALARGQGQL |
| | WRNYGYDAAGELVESHDSLRGSTQFSYDPAGYLTQRVNTADRQLESFAWDAAGNLL |
| | DDAQRSSRGYVEGNRLRMWQNLRFDYDAFGNLATKLRGANQRQQFTYDGQDRLVA |
| | VRTQGARGVVETRFAYDPLGRRIAKTDRTLDVRGVTLREETKRFVWEGLRLAQEVRD |
| | TGVSSYVYSPDAPYMPAARVDAVKAEALANAAIDKARQATRIYHFHTDVSGAPQEAT |
| | NEAGDIVWAGQYSAWGKVAPNQHAPARIDQPLRYAGQYADDSTELHYNTFRFYDPD |
| | VGRFINQDPIGLMGGLNLYQYAPNSIAWTDWWGLAGSYTLGSYQISAPQLPAYNGQT |
| | VGTFYYVNDAGGLESRTFSSGGPTPYPNYANAGHVEGQSALFMRDNGISDGLVFHNN |
| | PEGTCGFCVNMTETLLPENSKLTVVPPEGSIPVKRGATGETRTFTGNSKSPKSPVKGGC |
| | [SEQ ID NO: 130] |
| DddA homolog in | >CO712_00910 NZ_CP023522.1:185368-189645 Burkholderia gladioli pv. |
| Burkholderia | gladioli strain FDAARGOS_389 chromosome 1, complete sequence |
| gladioli | GTGTACGAAGCGGCCCGCGTCACGGATCCGATCGAGCACACCAGCGCGCTGGCCG |
| DNA | GCTTCCTGGTGGGCGCCGTGCTCGGTATCGCCCTGATTGCTGCCGTGGCGTTCGCC |
| | ACGTTCACCTGCGGCTTCGGCGTGGCACTGCTGGCCGGCATGGCGGCCGGCATCG |
| | GCGCGCAGGTGCTGTTGTCGTTAGGGGAATCGATCGGGAAGATGTTCAGTTCGCA |
| | ATCCGGCGCGATCACGCTCGGCTCGCCGAACGTCTACGTGAACGGCAAGCAGGCC |
| | GCCTACGCCACGCTCAGCAGCGTGACGTGCAGCAAGCACAACCCGACGCCGCTCG |
| | TCGCGCAGGGCTCCACCAACATCTTCATCAACGGCAAGCCGGCCGCGCGCAAGGA |
| | CGACAAGATCACCTGCGGCGCGGCCATCTCGGACGGCTCGCACGACACCTACTTC |
| | CACGGAGGCATCCAGACCTGCCTGCCGATCGACGACGAAGTGCCGCCGTGGCTGC |
| | GCACCGCCACCGACTGGGCGTTCGCGCTGGCCGGGCTGGTGGGCGGGCTCGGCGG |
| | CCTACTCAAGGAAGCGGGCGGGCTGTCGCACGCGGTGATGCCGTGCGCGGCGAAG |
| | TTCATCGGCGGCTACGTGCTCGGCGAGGCGGCGAGCCGCTACGTGATCGGCCCGG |
| | CCATCAACAGCGCGATCGGCGGGATGTTCGGCAACCCGGTAGACGTCACCACTGG |
| | GCGCAAGATCCTCCCTGCCGAATCGGAAACCGATTACGTCGTGCCCAGCCCGATG |
| | CCGGTGGCGATCCGGCGCTTCTATTCGAGCGACCTCGATTACGTCGGCACGCTTGG |
| | GCGCGGCTGGGTGCTGCCGTGGGAGCTGCGCCTGCACGCGCGTGACGGTCGGCTC |
| | TGGTACACCGACGCGCAGGGGCGCGAGAGCGGCTTCCCGATCCTGAAACCGGGCC |
| | AGGCCGCGTTCAGCGAGGCCGATCAGCGCTATCTGACCTGCACGCCGGATGGCCG |
| | CTACATCCTCCACGACGTCGGCGAAACCTATTACGACTTCGGCCGCTACGAGCCGG |
| | GCTCGGGCCGCATCGGCTGGGTGCGCCGGATCGAGGATCAGGCCGGCCAGTGGTG |
| | CCAGTTCGAGCGCGACAGCCGTGGCCGCGTGCGTGAAATCCAGACCTGCGGCGGC |
| | TTGCTGGCCGTGCTCGATTACGAGCCGGAGCACGAGCGGCTCGCCGAGGTGTCGC |
| | TCGTCAGCGGCGATCAGCGCCGCCTCGTCGTGGCCTACGGCTACGACGAAAACGG |
| | CCAGATGGCCTCCGTGACCGACGCGAACGGCGCGGTGGTGCGCCGCTTCACCTAT |
| | GCCGACGGGCGCATGACGAGCCATTCGAACGCGCTCGGTTTCACGTCGGGCTATA |
| | CGTGGAAGGTCATCGACGGCACGCCGCGAGTGGTCGCCACCCACACCAGCGAGGG |
| | CGAGGCCTGGGCGTTCGAGTACGACATCGAAGGCCGCCGCACCCATGTGCGGCAT |
| | GCCGACGGCCGCCACGCGCAATGGCGCTACGACGCGCAATTCCAGATCGTCGAGT |
| | ACCTCGATTTCGACGGCCGTCGCTACGGGCTCAAGTACAACGCTGCCGGCATGCCC |
| | GTGATGCTGACGCTGCCCGGCGAACGAACCGTGATGTTCGAGTACGACGACGCCG |
| | GCCGCATCGTCGCCGAAACCGATCCCCTCGGCCGCACCACGAAAACGCGCTACGA |
| | CGGCAACAGCATGCGGCCCGTCGAGATCATCTTGCCCGACGGCAGCGCCTGGCAC |
| | GCCGAATACGACCGGCAGGGCCGGCTGCTCGTCACCCGTGATCCGCTCGACCGGG |
| | AGAATCGCTACGAATATCCGGAGGCACTGAGCGCGCTCCCGGTGGCGCATGTCGA |
| | TGCGCTGGGCGGGCGCAAGACGTTCGAGTGGAACCGGCTCGGCGAGCTGGTGGCC |
| | TACACCGATTGCTCGGGCAAGACCACGCGCAATTTTTTCGATGCATTCGGCCTGCC |
| | GCTCGCGCGCGAGAACGCGCTCGGGCACCGCGTGTCGTTCGATCTGCGCCCGACC |
| | GGCGAGACGCGCCGCGTCACCTATCCCGACGGCAGTTCCGAAAGCTACGAATACG |
| | ACGCCGCCGGGCTGATGATCCGGCACATCGGGCTGGGCGGCCGGATGCAGACGTT |
| | GCAGCGCAATGCGCGCGGGCAACTCGTCGAGGCGGTCGATCCGGCCGGGCGGCGA |
| | ACCCGCTACCACTACGACGCCGAAGGGCGGCTGCGCGAGCTGCAACAGGCCCACG |
| | CGCGCTACGCATTCGCGTACAGCGCAGGCGGGCGGCTTGTCAGCGAAACGCGGCC |
| | CGACGGCGTGCTGCGCCGCTTCGAATACGGCGAGGCCGGCGATCTGGCGGCGCTC |
| | GAGATCGTCGGAACGGCCGATGATTGCGCTCCAAACGATCGCCCGGTTCGCGCGA |
| | TCCGCTTCGAGCGCGACCGGATGGGTAACCTGTGCGTGCAGCACACGCCTACCGA |
| | GGTGACGCGCTACGAGCGCGACGCCGGCGGCCGCCTGCTCGAAGTCGCGAGCGTG |
| | CCGACCGCGGCCGGACTGGCGCTCGGCATCGCGCCCGACACGCTGACCTTCGAAT |
| | ACGACAAGGCCGGGCGGCTGAGCGCCGAACACGGCGCGAACGGCAGCGTCCAGT |
| | ACACGCTCGACGCGCTCGACAACGTGTTGAAGCTCGCCTTGCCGCACGAACAGAC |
| | GCTGCAGATGCTGCGCTACGGCTCGGGGCACGTGCACCAGATTCGCCACGGCGAC |
| | CAGGTCGTCAGCGATTTCGAGCGCGACGACCTGCATCGCGAGTTGACGCGCACGC |
| | AGGGCCCCCTGACCGAGCGGACCGCCTACGACCTGCTGGGCCGCAAGATCTGGCA |
| | ATCAGCCGGCTTCCAGCCCGACGCGCTTGCGCGTGGGCAGGGCCAGCTGTGGCGC |
| | AACTACGGCTACGACGCCGCCGGGGAACTGGTCGAGAGCCACGACAGCCTGCGCG |
| | GCAGCACGCAGTTCAGCTACGATCCGGCCGGCTATCTGACGCAGCGCGTGAACAC |
| | CGCCGACCGGCAGCTCGAATCGTTCGCCTGGGACGCCGCCGGCAACCTGCTCGAC |
| | GATGCGCAACGCAGCAGCCGCGGCTATGTCGAGGGCAACCGGCTGCGCATGTGGC |
| | AGAACCTGCGCTTCGACTACGACGCGTTCGGCAATCTCGCGACCAAGCTGCGCGG |
| | CGCGAATCAGCGCCAGCAGTTCACGTACGATGGGCAGGATCGGCTCGTGGCCGTG |
| | CGCACGCAGGGCGCGCGCGGCGTGGTGGAGACGCGTTTCGCCTACGATCCGCTCG |
| | GGCGGCGCATCGCCAAGACCGATAGGACACTCGACGTGCGCGGCGTAACGCTGCG |
| | CGAGGAAACGAAGCGGTTCGTATGGGAAGGGCTGCGGCTCGCGCAGGAGGTGCG |
| | CGACACCGGCGTGAGCAGCTACGTGTACAGCCCGGATGCGCCTTACATGCCCGCG |
| | GCGCGGGTCGATGCGGTGAAAGCCGAAGCGCTCGCAAACGCCGCGATCGACAAG |
| | GCCAGACAGGCGACGCGGATCTATCACTTTCATACCGATGTGTCGGGCGCACCGC |
| | AAGAAGCGACGAACGAGGCCGGCGACATTGTTTGGGCCGGCCAATACTCAGCCTG |
| | GGGCAAGGTGGCGCCGAACCAGCATGCCCCAGCCCGGATCGATCAGCCGCTCCGC |
| | TACGCCGGACAATATGCCGATGACAGTACCGAGCTGCACTACAACACGTTTCGTTT |
| | CTACGATCCGGATGTCGGCCGGTTTATCAATCAGGATCCAATCGGGTTGATGGGGG |
| | GGCTGAATCTTTACCAATATGCACCCAACTCAATCGCGTGGACCGACTGGTGGGG |
| | GCTGGCCGGCAGCTATACGCTCGGTTCCTATCAAATTTCTGCTCCTCAACTTCCCGC |
| | CTACAATGGGCAGACTGTTGGGACCTTCTACTATGTAAACGACGCGGGCGGGCTC |
| | GAATCGAGGACATTCTCTTCTGGAGGGCCGACCCCTTATCCAAATTATGCCAATGC |
| | CGGGCACGTGGAAGGCCAGTCCGCACTGTTCATGAGGGATAACGGAATTTCAGAC |
| | GGACTGGTTTTCCACAACAACCCTGAGGGTACTTGCGGATTCTGCGTCAATATGAC |
| | CGAAACGCTTTTGCCTGAAAATTCCAAACTTACCGTCGTTCCGCCCGAGGGCTCGA |
| | TTCCGGTCAAGCGGGGCGCGACGGGCGAAACGAGAACATTTACAGGGAACAGCA |
| | AGTCTCCGAAGTCCCCTGTCAAAGGAGGATGTTGA (SEQ ID NO: 131) |
| DddA homolog in | >AJY63123.1 RHS repeat-associated core domain protein [Burkholderia |
| Burkholderia | glumae LMG 2196 = ATCC 33617] |
| glumae LMG | MYEAARVTDPIEHTSALTGFLVGAVLGIALIAAVAFATFTCGFGVALLAGMAAGIGAQ |
| 2196 | VLLSLGESIGKMFSSQSGAITLGSPNVYVNGKPTAYAMLSSVTCSKHNPTPLVAQGST |
| PROTEIN | NIFINGKPAARKDDKITCGATISDGSHDTYFHGGTQTCLPIDDEVPPWLRTATDWAFAL |
| | AGLVGGLGGLLKEAGGLSRAVMPCAAKFIGGYVLGEAASRYVVGPAINSAIGGMFGN |
| | PVDVTTGRKILLAESETDYVVPSPMPVAIRRFYSSDLDYVGTLGRGWVLPWELRLHAR |
| | DGRLWYTDAQGRESGFPMLQPGHAAFSEADQRYLTCTPDGRYILHDLGETYYDFGHY |
| | EPGSGRIGWVRRIEDQAGQWCQFERDSRGRVREIQTCGGLLAVLDYEPEHGRLAGVS |
| | LVSGDQRRLVVAYGYDEHGQMASVTDANGALVRRFTYADGRMTSHSNALGFTSGYT |
| | WQAVGGAPRVVATHTSEGEAWAFEYDIEGRRTHVRHADGRHAQWRYDAQFQIVEY |
| | LDFDGRRYGLKYNDAGMPVMLTLPGERTVTFEYDDAGRIVAETDPLGRTTKTRYDG |
| | NSRRPVEIIAPDGSAWHAEYDRQGRLLATRDPLDRENRYEYPKALSALPIAHVDALGG |
| | RKTFEWNRLGELVAYTDCSGKTTRNFYDAFGLPLARENALGHRVTFDLRPTGEARRV |
| | TYPDGSTESYEYDAAGLMIRHVGLGGRTQIALRNARGQIVEAVDPAGRRTCYRYDAE |
| | GRLRELQQGHARYAFTYSAGGRLTSETRPDGVRRRFEYGEAGDLAALDIVGAADDAT |
| | ANDRPVRTIRFERDRMGNLCAQHTPTEVTRYTRDTGGRLLEVACVPTAAGLALGIAPD |
| | TLTFEYDKAGRLSAEHGANGSVRYTLDALDNVMKLALPHEQTLQMLRYGSGHVHQI |
| | RCGDQVVSDFERDDLHRELTRTQGRLTERTAYDLLGRKIWQSAGFQPDALARGQGQV |
| | WRNYGYDAAGELAESHDSLRGSTQFSYDPAGYLTQRVNTADRQLESFAWDAAGNLL |
| | DDAQRRSRGYVEGNRLRMWQNLRFEYDPFGNLATKLRGANQRQQFTYDGQDRLVA |
| | VRTQDARGVVETRFAYDPLGRRIAKTDIVRDARGVALREETKRFVWEGLRLAQEVRD |
| | TGVSSYVYSPDAPYTPAARVDAVLAEAMAAAAIEQARQATRIYHFHTDVSGAPQEAT |
| | NEAGDIVWAGQYSAWGKVAPNQHAPARIDQPLRYAGQYADDSTELHYNTFRFYDPD |
| | VGRFINQDPIGLMGGLNLYQYAPNSIAWTDWWGLAGSYTLGSYQISAPQLPAYNGQT |
| | VGTFYYVNGAGGLESRTFSSGGPTPYPNYANAGHVEGQSALFMRDNGISDGLVFHNN |
| | PEGTCGFCVNMTETLLPENSKLTVVPPEGAIPVKRGATGETRTFTGNSKSPKSPVKGEC |
| | [SEQ ID NO: 132] |
| DddA homolog in | >KS03_3390 CP009434.1:65330-69607 Burkholderia glumae LMG 2196 = ATCC |
| Burkholderia | 33617 chromosome II, complete sequence |
| glumae LMG | GTGTACGAAGCGGCCCGCGTCACCGACCCGATCGAACACACCAGCGCGCTGACCG |
| 2196 | GCTTTCTGGTGGGCGCCGTGCTCGGCATTGCCCTGATCGCCGCGGTGGCGTTCGCC |
| DNA | ACCTTCACCTGCGGCTTCGGCGTGGCGCTGCTGGCCGGCATGGCCGCCGGCATCGG |
| | CGCGCAGGTGCTGTTGTCGTTAGGAGAATCGATCGGGAAGATGTTCAGTTCGCAAT |
| | CCGGCGCGATCACGCTCGGCTCGCCGAACGTCTATGTGAACGGCAAGCCGACCGC |
| | CTACGCCATGCTCAGCAGCGTGACGTGCAGCAAGCACAACCCGACGCCGCTCGTC |
| | GCGCAGGGGTCCACCAACATCTTCATCAACGGCAAGCCGGCCGCCCGCAAGGACG |
| | ACAAGATCACCTGCGGCGCGACCATCTCCGACGGCTCGCACGACACCTATTTCCAC |
| | GGCGGCACCCAGACCTGCCTGCCGATCGACGACGAAGTGCCGCCGTGGCTGCGCA |
| | CCGCCACCGACTGGGCGTTCGCGCTGGCCGGGCTGGTGGGCGGGCTCGGCGGCCT |
| | GCTCAAGGAAGCGGGCGGGCTGTCGCGCGCGGTGATGCCGTGCGCGGCGAAGTTC |
| | ATCGGCGGCTACGTGCTCGGCGAGGCGGCGAGCCGCTACGTGGTCGGCCCGGCCA |
| | TCAACAGCGCGATCGGCGGGATGTTCGGCAACCCGGTGGACGTCACCACCGGGCG |
| | CAAGATCCTGCTGGCGGAATCGGAAACCGATTACGTGGTGCCCAGCCCGATGCCG |
| | GTGGCGATCCGGCGCTTCTATTCGAGCGACCTCGACTACGTCGGCACGCTCGGGCG |
| | CGGCTGGGTGCTGCCGTGGGAACTGCGGCTGCACGCGCGCGACGGGCGGCTCTGG |
| | TACACCGACGCGCAGGGGCGCGAGAGCGGCTTCCCGATGCTCCAGCCGGGCCATG |
| | CCGCGTTCAGCGAGGCCGACCAGCGCTATCTGACCTGCACCCCGGATGGCCGCTA |
| | CATCCTGCACGACCTCGGCGAAACCTATTACGACTTCGGCCACTACGAGCCGGGCT |
| | CGGGCCGCATCGGCTGGGTGCGCCGCATCGAGGATCAGGCCGGCCAGTGGTGCCA |
| | GTTCGAGCGCGACAGCCGCGGCCGCGTGCGCGAAATCCAGACCTGCGGCGGCTTG |
| | CTGGCCGTGCTCGATTACGAGCCGGAACACGGGCGGCTCGCCGGGGTGTCGCTCG |
| | TCAGCGGGGATCAGCGCCGCCTCGTGGTGGCTTACGGCTATGACGAGCACGGCCA |
| | GATGGCGTCCGTGACCGATGCGAACGGCGCGCTGGTGCGCCGCTTCACCTATGCC |
| | GACGGGCGCATGACGAGCCATTCGAACGCGCTCGGCTTCACGTCGGGCTATACGT |
| | GGCAAGCCGTCGGCGGCGCGCCGCGGGTGGTTGCCACCCACACCAGCGAGGGCGA |
| | GGCCTGGGCCTTCGAGTACGACATTGAAGGACGCCGCACCCACGTGCGTCACGCC |
| | GACGGCCGCCACGCGCAATGGCGCTACGACGCGCAATTCCAGATCGTCGAGTACC |
| | TCGATTTCGACGGCCGGCGCTACGGGCTCAAGTACAACGACGCCGGCATGCCCGT |
| | GATGCTGACGCTGCCCGGCGAACGGACCGTGACGTTCGAGTACGACGATGCCGGC |
| | CGCATCGTCGCCGAAACCGATCCACTCGGCCGCACCACGAAAACGCGCTACGACG |
| | GCAACAGCAGGCGGCCCGTCGAGATCATCGCGCCCGACGGCAGCGCCTGGCACGC |
| | CGAATACGACCGGCAAGGCCGGCTGCTCGCCACCCGCGATCCGCTCGACCGGGAA |
| | AACCGCTACGAATACCCGAAGGCGCTCAGCGCGCTGCCGATCGCGCACGTCGATG |
| | CGCTGGGCGGGCGCAAGACGTTCGAGTGGAACCGGCTCGGCGAGCTGGTGGCCTA |
| | TACCGATTGCTCGGGCAAGACCACACGCAATTTTTACGACGCATTCGGTCTGCCGC |
| | TCGCGCGCGAGAACGCGCTCGGCCACCGCGTGACGTTCGACCTGCGCCCGACCGG |
| | CGAGGCGCGGCGCGTCACCTATCCCGACGGCAGTACAGAAAGCTACGAATACGAC |
| | GCCGCCGGGCTGATGATCCGGCACGTCGGGCTGGGCGGCCGGACGCAGATTGCGC |
| | TGCGCAACGCGCGTGGGCAGATCGTGGAGGCGGTCGATCCGGCCGGACGGCGCAC |
| | CTGCTACCGCTACGACGCCGAGGGGCGGCTGCGCGAGCTGCAACAGGGGCACGCG |
| | CGTTACGCGTTCACCTACAGCGCGGGCGGGCGGCTCACCAGCGAAACCCGGCCCG |
| | ACGGCGTGCGGCGCCGCTTCGAATACGGCGAGGCCGGCGATCTGGCGGCGCTCGA |
| | CATCGTCGGCGCGGCCGACGACGCCACGGCGAACGATCGTCCGGTTCGCACCATC |
| | CGCTTCGAGCGCGACCGCATGGGCAATCTGTGCGCGCAGCACACGCCCACCGAGG |
| | TGACGCGCTACACGCGCGACACCGGCGGCCGCCTGCTCGAAGTCGCATGCGTGCC |
| | GACCGCGGCCGGGCTGGCGCTCGGCATCGCGCCCGACACGCTGACCTTCGAATAC |
| | GACAAGGCCGGGCGGCTGAGTGCCGAACACGGCGCGAACGGCAGCGTCCGATAC |
| | ACGCTCGACGCGCTCGACAACGTGATGAAGCTCGCCCTGCCGCACGAGCAGACGC |
| | TGCAGATGCTGCGCTACGGCTCGGGGCACGTGCATCAGATCCGCTGCGGCGACCA |
| | GGTGGTCAGCGATTTCGAGCGCGACGACCTGCATCGCGAGCTGACGCGCACTCAG |
| | GGCCGCCTGACCGAGCGTACCGCCTACGACCTGCTGGGCCGCAAGATCTGGCAAT |
| | CGGCCGGCTTCCAGCCCGACGCGCTTGCGCGCGGGCAGGGCCAGGTGTGGCGCAA |
| | CTACGGCTACGACGCCGCCGGCGAACTGGCCGAGAGCCACGATAGCCTGCGCGGC |
| | AGCACGCAGTTCAGCTACGATCCGGCCGGCTATCTGACGCAGCGCGTCAATACCG |
| | CCGACCGGCAGCTCGAATCGTTCGCCTGGGATGCCGCCGGCAACCTGCTCGACGA |
| | TGCGCAGCGCCGCAGCCGCGGTTATGTCGAGGGCAACCGGCTGCGCATGTGGCAG |
| | AACCTGCGCTTCGAATACGACCCGTTCGGCAATCTCGCGACCAAGCTGCGCGGCG |
| | CGAACCAGCGCCAGCAGTTCACTTACGACGGGCAGGATCGGCTCGTGGCGGTGCG |
| | CACGCAGGACGCGCGCGGCGTGGTGGAGACGCGTTTCGCCTACGATCCGCTGGGG |
| | CGGCGCATCGCCAAGACGGATATTGTGCGCGACGCGCGCGGCGTAGCGCTGCGCG |
| | AGGAAACGAAGCGGTTCGTGTGGGAGGGGCTGCGGCTCGCGCAGGAGGTGCGCG |
| | ACACGGGCGTGAGCAGCTACGTGTACAGCCCGGACGCGCCCTATACGCCCGCGGC |
| | GCGCGTGGATGCCGTGCTGGCCGAGGCCATGGCCGCCGCTGCCATCGAGCAGGCC |
| | AGACAGGCGACGCGGATCTATCACTTTCATACCGATGTGTCGGGCGCACCGCAAG |
| | AAGCGACGAACGAGGCTGGCGACATTGTTTGGGCCGGCCAATACTCAGCCTGGGG |
| | CAAGGTGGCGCCGAACCAGCATGCCCCCGCCCGGATCGATCAGCCGCTCCGCTAC |
| | GCCGGACAATATGCCGACGACAGTACCGAGCTGCACTACAACACGTTTCGTTTCTA |
| | CGATCCGGACGTCGGCCGGTTTATCAATCAGGATCCAATCGGGTTGATGGGGGGG |
| | CTGAATCTTTACCAATATGCACCCAACTCGATCGCATGGACCGACTGGTGGGGGCT |
| | GGCCGGCAGCTATACGCTCGGTTCCTATCAAATTTCTGCGCCTCAACTTCCGGCCT |
| | ACAATGGACAGACTGTTGGGACCTTCTACTACGTGAACGGCGCGGGCGGGCTCGA |
| | ATCGAGGACATTCTCTTCCGGAGGGCCGACCCCTTATCCAAATTATGCCAATGCCG |
| | GGCACGTGGAGGGCCAGTCCGCGCTGTTCATGAGGGATAACGGAATTTCAGACGG |
| | ACTGGTTTTCCACAACAACCCTGAGGGCACTTGCGGATTCTGCGTTAATATGACCG |
| | AAACGCTTTTGCCTGAAAATTCCAAACTTACCGTCGTTCCGCCCGAGGGCGCGATC |
| | CCGGTCAAGCGGGGCGCGACGGGCGAAACGAGAACATTTACGGGGAACAGCAAG |
| | TCTCCGAAGTCCCCTGTCAAAGGAGAATGTTGA [SEQ ID NO: 133] |
| DddA homolog in | >ACR30728.1 Rhs family protein [Burkholderia glumae BGR1] |
| Burkholderia | MYEAARVTDPIEHTSALTGFLVGAVLGIALIAAVAFATFTCGFGVALLAGMAAGIGAQ |
| glumae BGR1 | VLLSLGESIGKMFSSQSGAITLGSPNVYVNGKPTAYAMLSSVTCSKHNPTPLVAQGST |
| PROTEIN | NIFINGKPAARKDDKITCGATISDGSHDTYFHGGTQTCLPIDDEVPPWLRTATDWAFAL |
| | AGLVGGLGGLLKEAGGLSRAVMPCAAKFIGGYVLGEAASRYVVGPAINSAIGGMFGN |
| | PVDVTTGRKILLAESETDYVVPSPMPVAIRRFYSSDLDYVGTLGRGWVLPWELRLHAR |
| | DGRLWYTDAQGRESGFPMLQPGHAAFSEADQRYLTCTPDGRYILHDLGETYYDFGHY |
| | EPGSGRIGWVRRIEDQAGQWCQFERDSRGRVREIQTCGGLLAVLDYEPEHGRLAGVS |
| | LVSGDQRRLVVAYGYDEHGQMASVTDANGALVRRFTYADGRMTSHSNALGFTSGYT |
| | WQAVGGAPRVVATHTSEGEAWAFEYDIEGRRTHVRHADGRHAQWRYDAQFQIVEY |
| | LDFDGRRYGLKYNDAGMPVMLTLPGERTVTFEYDDAGRIVAETDPLGRTTKTRYDG |
| | NSRRPVEIIAPDGSAWHAEYDRQGRLLATRDPLDRENRYEYPKALSALPIAHVDALGG |
| | RKTFEWNRLGELVAYTDCSGKTTRNFYDAFGLPLARENALGHRVTFDLRPTGEARRV |
| | TYPDGSTESYEYDAAGLMIRHVGLGGRTQIALRNARGQIVEAVDPAGRRTCYRYDAE |
| | GRLRELQQGHARYAFTYSAGGRLTSETRPDGVRRRFEYGEAGDLAALDIVGAADDAT |
| | ANDRPVRTIRFERDRMGNLCAQHTPTEVTRYTRDTGGRLLEVACVPTAAGLALGIAPD |
| | TLTFEYDKAGRLSAEHGANGSVRYTLDALDNVMKLALPHEQTLQMLRYGSGHVHQI |
| | RCGDQVVSDFERDDLHRELTRTQGRLTERTAYDLLGRKIWQSAGFQPDALARGQGQV |
| | WRNYGYDAAGELAESHDSLRGSTQFSYDPAGYLTQRVNTADRQLESFAWDAAGNLL |
| | DDAQRRSRGYVEGNRLRMWQNLRFEYDPFGNLATKLRGANQRQQFTYDGQDRLVA |
| | VRTQDARGVVETRFAYDPLGRRIAKTDIVRDARGVALREETKRFVWEGLRLAQEVRD |
| | TGVSSYVYSPDAPYTPAARVDAVLAEAMAAAAIEQARQATRIYHFHTDVSGAPQEAT |
| | NEAGDIVWAGQYSAWGKVAPNQHAPARIDQPLRYAGQYADDSTELHYNTFRFYDPD |
| | VGRFINQDPIGLMGGLNLYQYAPNSIAWTDWWGLAGSYTLGSYQISAPQLPAYNGQT |
| | VGTFYYVNGAGGLESRTFSSGGPTPYPNYANAGHVEGQSALFMRDNGISDGLVFHNN |
| | PEGTCGFCVNMTETLLPENSKLTVVPPEGAIPVKRGATGETRTFTGNSKSPKSPVKGEC |
| | [SEQ ID NO: 132] |
| DddA homolog in | >bglu_2g02600 NC_012721.2:303868-308145 Burkholderia glumae BGR1 |
| Burkholderia | chromosome 2, complete sequence |
| glumae BGR1 | GTGTACGAAGCGGCCCGCGTCACCGACCCGATCGAACACACCAGCGCGCTGACCG |
| DNA | GCTTTCTGGTGGGCGCCGTGCTCGGCATTGCCCTGATCGCCGCGGTGGCGTTCGCC |
| | ACCTTCACCTGCGGCTTCGGCGTGGCGCTGCTGGCCGGCATGGCCGCCGGCATCGG |
| | CGCGCAGGTGCTGTTGTCGTTAGGAGAATCGATCGGGAAGATGTTCAGTTCGCAAT |
| | CCGGCGCGATCACGCTCGGCTCGCCGAACGTCTATGTGAACGGCAAGCCGACCGC |
| | CTACGCCATGCTCAGCAGCGTGACGTGCAGCAAGCACAACCCGACGCCGCTCGTC |
| | GCGCAGGGGTCCACCAACATCTTCATCAACGGCAAGCCGGCCGCCCGCAAGGACG |
| | ACAAGATCACCTGCGGCGCGACCATCTCCGACGGCTCGCACGACACCTATTTCCAC |
| | GGCGGCACCCAGACCTGCCTGCCGATCGACGACGAAGTGCCGCCGTGGCTGCGCA |
| | CCGCCACCGACTGGGCGTTCGCGCTGGCCGGGCTGGTGGGCGGGCTCGGCGGCCT |
| | GCTCAAGGAAGCGGGCGGGCTGTCGCGCGCGGTGATGCCGTGCGCGGCGAAGTTC |
| | ATCGGCGGCTACGTGCTCGGCGAGGCGGCGAGCCGCTACGTGGTCGGCCCGGCCA |
| | TCAACAGCGCGATCGGCGGGATGTTCGGCAACCCGGTGGACGTCACCACCGGGCG |
| | CAAGATCCTGCTGGCGGAATCGGAAACCGATTACGTGGTGCCCAGCCCGATGCCG |
| | GTGGCGATCCGGCGCTTCTATTCGAGCGACCTCGACTACGTCGGCACGCTCGGGCG |
| | CGGCTGGGTGCTGCCGTGGGAACTGCGGCTGCACGCGCGCGACGGGCGGCTCTGG |
| | TACACCGACGCGCAGGGGCGCGAGAGCGGCTTCCCGATGCTCCAGCCGGGCCATG |
| | CCGCGTTCAGCGAGGCCGACCAGCGCTATCTGACCTGCACCCCGGATGGCCGCTA |
| | CATCCTGCACGACCTCGGCGAAACCTATTACGACTTCGGCCACTACGAGCCGGGCT |
| | CGGGCCGCATCGGCTGGGTGCGCCGCATCGAGGATCAGGCCGGCCAGTGGTGCCA |
| | GTTCGAGCGCGACAGCCGCGGCCGCGTGCGCGAAATCCAGACCTGCGGCGGCTTG |
| | CTGGCCGTGCTCGATTACGAGCCGGAACACGGGCGGCTCGCCGGGGTGTCGCTCG |
| | TCAGCGGGGATCAGCGCCGCCTCGTGGTGGCTTACGGCTATGACGAGCACGGCCA |
| | GATGGCGTCCGTGACCGATGCGAACGGCGCGCTGGTGCGCCGCTTCACCTATGCC |
| | GACGGGCGCATGACGAGCCATTCGAACGCGCTCGGCTTCACGTCGGGCTATACGT |
| | GGCAAGCCGTCGGCGGCGCGCCGCGGGTGGTTGCCACCCACACCAGCGAGGGCGA |
| | GGCCTGGGCCTTCGAGTACGACATTGAAGGACGCCGCACCCACGTGCGTCACGCC |
| | GACGGCCGCCACGCGCAATGGCGCTACGACGCGCAATTCCAGATCGTCGAGTACC |
| | TCGATTTCGACGGCCGGCGCTACGGGCTCAAGTACAACGACGCCGGCATGCCCGT |
| | GATGCTGACGCTGCCCGGCGAACGGACCGTGACGTTCGAGTACGACGATGCCGGC |
| | CGCATCGTCGCCGAAACCGATCCACTCGGCCGCACCACGAAAACGCGCTACGACG |
| | GCAACAGCAGGCGGCCCGTCGAGATCATCGCGCCCGACGGCAGCGCCTGGCACGC |
| | CGAATACGACCGGCAAGGCCGGCTGCTCGCCACCCGCGATCCGCTCGACCGGGAA |
| | AACCGCTACGAATACCCGAAGGCGCTCAGCGCGCTGCCGATCGCGCACGTCGATG |
| | CGCTGGGCGGGCGCAAGACGTTCGAGTGGAACCGGCTCGGCGAGCTGGTGGCCTA |
| | TACCGATTGCTCGGGCAAGACCACACGCAATTTTTACGACGCATTCGGTCTGCCGC |
| | TCGCGCGCGAGAACGCGCTCGGCCACCGCGTGACGTTCGACCTGCGCCCGACCGG |
| | CGAGGCGCGGCGCGTCACCTATCCCGACGGCAGTACAGAAAGCTACGAATACGAC |
| | GCCGCCGGGCTGATGATCCGGCACGTCGGGCTGGGCGGCCGGACGCAGATTGCGC |
| | TGCGCAACGCGCGTGGGCAGATCGTGGAGGCGGTCGATCCGGCCGGACGGCGCAC |
| | CTGCTACCGCTACGACGCCGAGGGGCGGCTGCGCGAGCTGCAACAGGGGCACGCG |
| | CGTTACGCGTTCACCTACAGCGCGGGCGGGCGGCTCACCAGCGAAACCCGGCCCG |
| | ACGGCGTGCGGCGCCGCTTCGAATACGGCGAGGCCGGCGATCTGGCGGCGCTCGA |
| | CATCGTCGGCGCGGCCGACGACGCCACGGCGAACGATCGTCCGGTTCGCACCATC |
| | CGCTTCGAGCGCGACCGCATGGGCAATCTGTGCGCGCAGCACACGCCCACCGAGG |
| | TGACGCGCTACACGCGCGACACCGGCGGCCGCCTGCTCGAAGTCGCATGCGTGCC |
| | GACCGCGGCCGGGCTGGCGCTCGGCATCGCGCCCGACACGCTGACCTTCGAATAC |
| | GACAAGGCCGGGCGGCTGAGTGCCGAACACGGCGCGAACGGCAGCGTCCGATAC |
| | ACGCTCGACGCGCTCGACAACGTGATGAAGCTCGCCCTGCCGCACGAGCAGACGC |
| | TGCAGATGCTGCGCTACGGCTCGGGGCACGTGCATCAGATCCGCTGCGGCGACCA |
| | GGTGGTCAGCGATTTCGAGCGCGACGACCTGCATCGCGAGCTGACGCGCACTCAG |
| | GGCCGCCTGACCGAGCGTACCGCCTACGACCTGCTGGGCCGCAAGATCTGGCAAT |
| | CGGCCGGCTTCCAGCCCGACGCGCTTGCGCGCGGGCAGGGCCAGGTGTGGCGCAA |
| | CTACGGCTACGACGCCGCCGGCGAACTGGCCGAGAGCCACGATAGCCTGCGCGGC |
| | AGCACGCAGTTCAGCTACGATCCGGCCGGCTATCTGACGCAGCGCGTCAATACCG |
| | CCGACCGGCAGCTCGAATCGTTCGCCTGGGATGCCGCCGGCAACCTGCTCGACGA |
| | TGCGCAGCGCCGCAGCCGCGGTTATGTCGAGGGCAACCGGCTGCGCATGTGGCAG |
| | AACCTGCGCTTCGAATACGACCCGTTCGGCAATCTCGCGACCAAGCTGCGCGGCG |
| | CGAACCAGCGCCAGCAGTTCACTTACGACGGGCAGGATCGGCTCGTGGCGGTGCG |
| | CACGCAGGACGCGCGCGGCGTGGTGGAGACGCGTTTCGCCTACGATCCGCTGGGG |
| | CGGCGCATCGCCAAGACGGATATTGTGCGCGACGCGCGCGGCGTAGCGCTGCGCG |
| | AGGAAACGAAGCGGTTCGTGTGGGAGGGGCTGCGGCTCGCGCAGGAGGTGCGCG |
| | ACACGGGCGTGAGCAGCTACGTGTACAGCCCGGACGCGCCCTATACGCCCGCGGC |
| | GCGCGTGGATGCCGTGCTGGCCGAGGCCATGGCCGCCGCTGCCATCGAGCAGGCC |
| | AGACAGGCGACGCGGATCTATCACTTTCATACCGATGTGTCGGGCGCACCGCAAG |
| | AAGCGACGAACGAGGCTGGCGACATTGTTTGGGCCGGCCAATACTCAGCCTGGGG |
| | CAAGGTGGCGCCGAACCAGCATGCCCCCGCCCGGATCGATCAGCCGCTCCGCTAC |
| | GCCGGACAATATGCCGACGACAGTACCGAGCTGCACTACAACACGTTTCGTTTCTA |
| | CGATCCGGACGTCGGCCGGTTTATCAATCAGGATCCAATCGGGTTGATGGGGGGG |
| | CTGAATCTTTACCAATATGCACCCAACTCGATCGCATGGACCGACTGGTGGGGGCT |
| | GGCCGGCAGCTATACGCTCGGTTCCTATCAAATTTCTGCGCCTCAACTTCCGGCCT |
| | ACAATGGACAGACTGTTGGGACCTTCTACTACGTGAACGGCGCGGGCGGGCTCGA |
| | ATCGAGGACATTCTCTTCCGGAGGGCCGACCCCTTATCCAAATTATGCCAATGCCG |
| | GGCACGTGGAGGGCCAGTCCGCGCTGTTCATGAGGGATAACGGAATTTCAGACGG |
| | ACTGGTTTTCCACAACAACCCTGAGGGCACTTGCGGATTCTGCGTTAATATGACCG |
| | AAACGCTTTTGCCTGAAAATTCCAAACTTACCGTCGTTCCGCCCGAGGGCGCGATC |
| | CCGGTCAAGCGGGGCGCGACGGGCGAAACGAGAACATTTACGGGGAACAGCAAG |
| | TCTCCGAAGTCCCCTGTCAAAGGAGAATGTTGA [SEQ ID NO: 133] |
| DddA homolog in | >AOT60363.1 tRNA nuclease WapA precursor [Streptomyces rubrolavendulae] |
| Streptomyces | MSSSDAGRAFGVPENVLARFTRYPGGARRRAGRTARARRLGIVLSAVLSATLLPAEA |
| rubrolavendulae | WAIAPPAPRTGPTLDALQQEEEVDPDPAAMEELDDWDGGPVEPPADYTPTEVTPPTG |
| PROTEIN | GTAPVPLDSAGEELVPAGTLPVRIGQASPTEEDPAPPAPSGTWDVTVEPRATTEAAAV |
| | DGAIIKLTPPASGSTPVDVELDYGRFEDLFGTEWSSRLKLTQLPECFLTTPELEECGTPIT |
| | IPTSNDPATGTVRATVDPADGQPQGLAAQSGGGPAVLAATDSASGAGGTYKATSLSA |
| | TGSWTAGGSGGGFSWSYPLTIPDTPAGPAPKISLSYSSQSVDGRTSVANGQASWIGDG |
| | WDYHPGFVERRYRSCNDDRSGTPNNDNSADKEKSDLCWASDNVVMSLGGSTTELVR |
| | DDTTGTWVAQNDTGARIEYKDKDGGALAAQTAGYDGEHWVVTTRDGTRYWFGRN |
| | TLPGRGAPTNSALTVPVFGNHTGEPCHAATYAASSCTQAWRWNLDYVEDVHGNAM |
| | VVDWKKEQNRYAKNEKFKAAVSYDRDAYPTQILYGLRADDLAGPPAGKVVFHAAPR |
| | CLESAATCSEAKFESKNYADKQPWWDTPATLHCKAGDENCYVTSPTFWSRVRLSAIE |
| | TQGQRTPGSTALSTVDRWTLHQSFPKQRTDTHPPLWLESITRVGFGRPDASGNQSSKA |
| | LPAVTFLPNKVDMPNRVLKSTTDQTPDFDRLRVEVIRTETGGETHVTYSAPCPVGGTR |
| | PTPASNGTRCFPVHWSPDPAAFSDENLDKSGYEPPLEWFNKYVVTKVTEMDLVAEQP |
| | SVETVYTYEGDAAWAKNTDEYGKPALRTYDQWRGYASVVTRTGTTANTGAADATE |
| | QSQTRTRYFRGMSGDAGRAKVHVTLTDVTGTATTVEDLLPYQGMAAETLTYTKAGG |
| | DVAARELAFPYSRKTASRARPGLPALEAYRTGTTRTDSIQHISGDRTRAAQNHTTYDD |
| | AYGLPTQTYSLTLSPNDSGTLVAGDERCTVTTYVHNTAAHIIGLPDRVRATTGDCAAA |
| | PNATTGQIVSDSRTAYDALGAFGTAPVKGLPVQVDTISGGGTSWITSARTEYDALGRA |
| | TKVTDAAGNSTTTTYSPATGPAFEVTVTNAAGHATTTTLDPGRGSALTVTDQNGRKT |
| | TSTYDELGRATGVWTPSRPVNQDASVRFVYQIEDSKVPAVHTRVLRDAGTYEESIELY |
| | DGFLRPRQTQREALGGGRIVTETLYNANGSAKEVRDGYLAEGEPARELFVPLSLDQVP |
| | SATRTAYDGLGRPVRTTTLHRGVPRHSATTAYGGDWELSRTGMSPDGTTPLSGSRAV |
| | KATTDALGRPARIQHFTTQNVSAESVDTTYTYDPRGPLAQVTDAQQNTWTYTYDARG |
| | RKTSSTDPDAGAAYFGYNALDQQVWSKDNQGRLQYTTYDVLGRQTELRDDSASGPL |
| | VAKWTFDTLPGAKGHPVASTRYNDGAAFTSEVTGYDTEYRPTGNKVTIPSTPMTTGL |
| | AGTYTYASTYTPTGKVQSVDLPATPGGLAAEKVITRYDGEDSPTTMSGLAWYTADTF |
| | LGPYGEVLRTASGEAPRRVWTTNVYDEDTRRLTRTTAHRETAPHPVSTTTYGYDTVG |
| | NITSIADQQPAGTEEQCFSYDPMGRLVHAWTDGNSAVCPRTSTAPGAGPARADVSAG |
| | VDGGGYWHSYAFDAIGNRTKLTVHDRTDAALDDTYTYTYGKTLPGNPQPVQPHTLT |
| | QVDAVLNEPGSRVEPRSTYAYDTSGNTTQRVIGGDTQTLAWDRRNKLTSVDTNNDGT |
| | PDVKYLYDASGNRLVEDDGTTRTLFLGEAEIVVNTAGQAVDARRYYSSPGAPTTIRTT |
| | GGKTTGHKLTVMLSDHHSTATTAVELTDTQPVTRRRFDPYGNPRGTEPTTWPDRRTY |
| | LGVGIDDPATGLTHIGAREYDASTGRFISVDPVMDLTDPLQMNGYTYANADPINNSDP |
| | TGLLLDARGGGTQKCVGTCVKDVTNRKGIPLPPGEEWKHEGEAQTDFNGDGFITVFP |
| | TVNVPAKWKKAKKYTEAFYKAVDTACFYGRESCADPEYPSRAHSINNWKGKACKAV |
| | GGKCPERLSWGEGPAFAGGFAIAAEEYAGRGGYRGGGARRGSPCKCFLAGTEVLMA |
| | DGSTKSIEDIKLGDEVVATDPVTGEAGAHPVSALIATENDKRFNELVIITSEGVERLTAT |
| | HEHPFWSPSEGEWLEAGELRTGMTLRSDSGETLVVAGNRAFTQRARTYNLTVADLHT |
| | YYVLAGQTPVLVHNANCGPHLKDLQKDYPRRTVGILDVGTDQLPMISGPGGQSGLLK |
| | NLPGRTKANGEHVETHAAAFLRMNPGVRKAVLYIDYPTGTCGTCRSTLPDMLPEGVQ |
| | LWVISPRRTEKFTGLPD [SEQ ID NO: 134] |
| DddA homolog in | >A4G23_03234 CP017316.1:3756245-3763321 Streptomyces rubrolavendulae |
| Streptomyces | strain MJM4426, complete genome |
| rubrolavendulae | ATGTCCTCGTCCGATGCGGGACGCGCCTTCGGCGTGCCCGAAAACGTCCTGGCGCG |
| DNA | TTTCACGCGGTATCCCGGCGGGGCGCGACGCCGTGCCGGGCGCACGGCGCGCGCC |
| | CGGCGCCTGGGCATCGTGCTGTCCGCCGTCCTCTCGGCGACCCTGCTGCCCGCCGA |
| | GGCATGGGCCATCGCGCCCCCGGCGCCGCGCACCGGTCCGACCCTGGACGCCCTC |
| | CAGCAGGAGGAGGAGGTCGATCCGGACCCGGCCGCCATGGAAGAGCTGGACGAC |
| | TGGGACGGTGGGCCGGTCGAGCCCCCGGCCGACTACACCCCCACCGAGGTCACGC |
| | CTCCCACCGGCGGCACCGCCCCGGTGCCGCTGGACAGCGCGGGCGAGGAACTGGT |
| | CCCGGCCGGGACCCTGCCCGTGCGCATCGGCCAGGCGTCCCCCACCGAGGAGGAC |
| | CCGGCACCCCCGGCACCCAGCGGCACGTGGGACGTCACCGTGGAGCCCCGCGCCA |
| | CCACCGAGGCGGCCGCCGTGGACGGCGCCATCATCAAGCTCACCCCGCCCGCCAG |
| | CGGCTCCACACCGGTCGACGTGGAACTCGACTACGGCCGGTTCGAGGACCTGTTC |
| | GGCACCGAGTGGTCCTCCCGGCTCAAGCTGACGCAGCTCCCGGAGTGCTTCCTCAC |
| | GACGCCCGAGCTGGAGGAGTGCGGCACCCCCATCACCATCCCGACGAGCAACGAC |
| | CCGGCCACCGGGACGGTCCGGGCCACCGTCGACCCGGCCGACGGGCAGCCGCAGG |
| | GCCTGGCCGCGCAGTCGGGCGGCGGTCCCGCCGTCCTCGCCGCGACCGACTCGGC |
| | GTCCGGCGCCGGCGGCACGTACAAGGCGACCTCCCTCTCGGCCACCGGCTCCTGG |
| | ACGGCCGGCGGCAGCGGCGGCGGCTTCTCCTGGTCGTATCCGCTCACCATCCCGGA |
| | CACCCCGGCCGGCCCCGCGCCGAAGATCTCCCTGTCGTACTCCTCCCAGTCCGTCG |
| | ACGGCCGCACCTCCGTCGCCAACGGCCAGGCGTCGTGGATAGGCGACGGCTGGGA |
| | CTACCACCCCGGCTTCGTCGAGCGCCGCTACCGCTCCTGCAACGACGACCGCTCCG |
| | GCACCCCGAACAACGACAACAGTGCGGACAAGGAGAAGTCCGACCTGTGCTGGGC |
| | GAGCGACAACGTCGTGATGTCGCTCGGCGGCTCCACCACCGAACTCGTCCGCGAC |
| | GACACGACCGGCACGTGGGTCGCGCAGAACGACACCGGTGCCCGGATCGAGTACA |
| | AGGACAAGGACGGCGGAGCCCTGGCCGCCCAGACCGCCGGCTACGACGGCGAGC |
| | ACTGGGTCGTCACCACCCGCGACGGAACCCGCTACTGGTTCGGCCGCAACACCCTC |
| | CCCGGCCGCGGCGCCCCCACGAACTCCGCCCTCACCGTCCCCGTCTTCGGCAACCA |
| | CACCGGCGAGCCCTGCCACGCCGCCACCTACGCCGCCTCCTCCTGCACCCAGGCGT |
| | GGCGCTGGAACCTCGACTACGTCGAGGACGTCCACGGCAACGCGATGGTCGTCGA |
| | CTGGAAGAAGGAGCAGAACCGGTACGCGAAGAACGAGAAGTTCAAGGCGGCTGT |
| | CTCCTACGACCGCGACGCGTATCCGACGCAGATCCTCTACGGCCTGCGCGCCGACG |
| | ACCTGGCGGGCCCGCCCGCCGGCAAGGTCGTCTTCCACGCCGCCCCGCGCTGCCTC |
| | GAAAGCGCGGCCACCTGCTCCGAAGCCAAGTTCGAGTCCAAGAACTACGCGGACA |
| | AGCAGCCCTGGTGGGACACACCGGCCACCCTGCACTGCAAGGCCGGTGACGAGAA |
| | CTGCTACGTCACCTCGCCGACGTTCTGGAGCCGCGTCCGCCTGTCGGCGATCGAGA |
| | CGCAGGGTCAGCGCACGCCCGGCTCGACGGCGCTGTCCACGGTCGACCGCTGGAC |
| | CCTGCACCAGTCGTTCCCGAAGCAGCGCACCGACACCCACCCGCCGCTCTGGCTGG |
| | AGTCGATCACCCGCGTGGGCTTCGGCCGGCCGGACGCCTCCGGCAACCAGTCGAG |
| | CAAGGCCCTCCCGGCGGTGACCTTCCTGCCCAACAAGGTCGACATGCCGAACCGC |
| | GTGCTGAAGAGCACGACGGACCAGACGCCCGATTTCGACCGCCTGCGCGTCGAGG |
| | TCATCCGCACGGAGACCGGCGGCGAGACCCATGTGACGTACTCCGCCCCCTGCCC |
| | CGTCGGCGGCACCCGCCCCACCCCGGCCTCCAACGGCACCCGCTGCTTCCCGGTCC |
| | ACTGGTCCCCCGACCCGGCGGCCTTCTCCGACGAGAACCTGGACAAGAGCGGCTA |
| | CGAGCCGCCCCTCGAGTGGTTCAACAAGTACGTCGTCACCAAGGTCACCGAGATG |
| | GACCTCGTGGCGGAGCAGCCCAGCGTCGAGACCGTCTACACCTACGAGGGCGACG |
| | CCGCCTGGGCGAAGAACACCGACGAGTACGGCAAGCCCGCCCTGCGCACCTACGA |
| | CCAGTGGCGCGGCTACGCGAGCGTCGTCACCCGCACGGGCACCACGGCCAACACC |
| | GGCGCCGCCGACGCCACCGAGCAGTCCCAGACCCGCACCCGGTACTTCCGCGGCA |
| | TGTCCGGCGACGCGGGCCGCGCCAAGGTGCACGTCACGCTCACGGACGTGACCGG |
| | CACCGCGACCACCGTCGAGGACCTGCTCCCGTACCAGGGCATGGCCGCCGAGACC |
| | CTTACCTACACCAAGGCGGGCGGCGACGTCGCCGCCCGCGAGCTGGCCTTCCCCTA |
| | CAGCAGGAAGACCGCCTCCCGCGCCCGCCCCGGCCTCCCCGCCCTGGAGGCGTAC |
| | CGCACGGGCACGACGCGCACGGACTCCATCCAGCACATCAGCGGCGACCGGACGC |
| | GCGCCGCTCAGAACCACACCACATACGACGACGCGTACGGCCTGCCCACCCAGAC |
| | CTACTCGCTGACACTCTCGCCGAACGACTCCGGCACCCTTGTCGCCGGTGACGAGC |
| | GGTGCACCGTCACGACGTACGTCCACAACACCGCCGCGCACATCATCGGCCTCCCC |
| | GACCGCGTCCGCGCCACGACGGGCGACTGCGCCGCCGCGCCGAACGCCACCACCG |
| | GCCAGATCGTCTCCGACAGCCGCACCGCGTACGACGCGCTCGGCGCCTTCGGCAC |
| | GGCCCCGGTCAAGGGCCTGCCGGTCCAGGTGGACACGATCTCCGGAGGCGGCACG |
| | AGCTGGATCACCTCGGCGCGCACGGAGTACGACGCGCTGGGCCGTGCGACCAAGG |
| | TCACCGACGCGGCGGGCAACTCCACCACGACCACGTACAGCCCGGCGACCGGCCC |
| | CGCGTTCGAGGTCACCGTGACCAACGCGGCTGGTCATGCCACGACCACCACCCTC |
| | GACCCCGGTCGCGGCTCGGCGCTGACCGTCACCGACCAGAACGGCCGCAAGACCA |
| | CCAGCACGTACGACGAACTCGGCCGGGCCACCGGCGTGTGGACGCCCTCCCGCCC |
| | GGTGAACCAGGACGCGTCCGTGCGCTTCGTCTACCAGATCGAGGACAGCAAGGTC |
| | CCGGCGGTGCACACTCGGGTCCTGCGCGACGCCGGTACGTACGAGGAGTCGATCG |
| | AGCTCTACGACGGCTTCCTCCGCCCCCGTCAGACCCAGCGCGAGGCGCTGGGCGG |
| | CGGCCGAATCGTCACCGAGACCCTCTACAACGCCAACGGCTCTGCGAAGGAAGTG |
| | CGCGACGGCTACCTGGCGGAGGGCGAGCCCGCGCGGGAACTGTTCGTCCCGCTCT |
| | CCCTCGACCAGGTGCCGAGCGCGACGAGGACGGCCTATGACGGCCTGGGCCGGCC |
| | CGTCCGGACGACGACCCTCCACAGGGGAGTCCCCCGGCACTCCGCCACCACGGCG |
| | TACGGCGGCGACTGGGAACTGAGCCGCACCGGCATGTCGCCCGACGGAACGACGC |
| | CGCTCTCTGGCAGCCGCGCCGTGAAGGCGACGACGGACGCGCTCGGCCGCCCGGC |
| | CCGCATCCAGCACTTCACCACCCAGAACGTGTCGGCCGAGAGCGTCGACACCACG |
| | TACACCTACGACCCCCGCGGCCCCCTTGCCCAGGTCACCGACGCCCAGCAGAACA |
| | CCTGGACGTACACGTACGACGCCCGTGGGCGCAAGACGTCCTCCACCGACCCGGA |
| | CGCGGGCGCCGCCTACTTCGGCTACAACGCGCTGGACCAGCAGGTCTGGTCGAAG |
| | GACAACCAGGGCCGCCTGCAGTACACGACGTACGACGTCCTGGGCCGCCAGACCG |
| | AGCTGCGCGACGACTCCGCGTCCGGCCCGCTGGTGGCGAAGTGGACCTTCGACAC |
| | CCTGCCGGGCGCCAAGGGCCACCCGGTCGCGTCGACCCGCTACAACGACGGCGCC |
| | GCGTTCACCAGCGAGGTGACCGGTTACGACACCGAGTACCGTCCGACCGGCAACA |
| | AGGTCACCATCCCCAGCACCCCGATGACCACGGGCCTCGCCGGCACGTACACGTA |
| | CGCCAGCACGTACACCCCGACCGGCAAGGTCCAGTCCGTCGACCTGCCCGCGACG |
| | CCCGGCGGGCTCGCCGCGGAGAAGGTGATCACCCGCTACGACGGCGAGGACTCGC |
| | CCACCACGATGTCGGGCCTGGCCTGGTACACGGCCGACACCTTCCTCGGCCCGTAC |
| | GGGGAAGTGCTGCGCACGGCGTCGGGCGAGGCCCCGCGCCGCGTGTGGACGACCA |
| | ACGTCTACGACGAGGACACCCGCCGCCTCACCAGGACCACCGCGCACCGGGAGAC |
| | GGCTCCCCACCCGGTCAGCACGACCACCTACGGCTACGACACGGTCGGCAACATC |
| | ACGTCCATCGCCGACCAGCAGCCGGCGGGTACCGAGGAGCAGTGCTTCTCGTACG |
| | ACCCGATGGGGCGCCTCGTCCACGCCTGGACGGACGGCAACAGCGCCGTCTGCCC |
| | CAGGACGTCCACGGCACCGGGCGCCGGCCCGGCCCGCGCCGACGTCTCGGCCGGT |
| | GTCGACGGCGGCGGATACTGGCACTCGTACGCGTTCGACGCGATCGGCAACCGGA |
| | CGAAGCTGACCGTCCACGACCGCACCGACGCGGCCCTGGACGACACGTACACCTA |
| | CACCTACGGCAAGACCCTGCCGGGTAACCCGCAGCCGGTCCAGCCGCACACCCTC |
| | ACCCAGGTCGACGCGGTGCTCAACGAGCCCGGATCGAGAGTCGAACCGCGCTCCA |
| | CATACGCCTACGACACCTCCGGCAACACCACCCAGCGCGTCATCGGCGGCGACAC |
| | CCAGACCCTGGCCTGGGACCGCCGCAACAAGCTGACGTCCGTCGACACGAACAAC |
| | GACGGCACACCGGACGTGAAGTACCTGTACGACGCGTCGGGCAACCGCCTGGTCG |
| | AGGACGACGGCACCACGCGCACCCTCTTCCTCGGCGAGGCCGAGATCGTCGTCAA |
| | CACGGCCGGCCAGGCCGTGGACGCGCGCCGCTACTACAGCAGCCCCGGCGCCCCG |
| | ACGACGATCCGCACGACCGGCGGCAAGACCACGGGCCACAAGCTGACCGTCATGC |
| | TGTCGGACCACCACAGCACGGCGACGACCGCGGTCGAGCTGACCGACACCCAGCC |
| | GGTCACCCGCCGCCGCTTCGACCCGTACGGCAACCCCCGCGGCACCGAGCCGACC |
| | ACCTGGCCCGACCGCCGCACCTACCTGGGCGTCGGCATCGACGACCCCGCCACGG |
| | GCCTGACCCACATCGGCGCCCGCGAATACGACGCATCGACGGGCCGCTTCATCTCC |
| | GTCGATCCGGTCATGGACCTCACGGACCCGCTCCAGATGAACGGGTACACCTACG |
| | CCAACGCGGACCCGATCAACAACAGCGACCCCACCGGACTGTTGCTCGACGCCCG |
| | AGGCGGCGGCACTCAGAAGTGCGTGGGAACCTGCGTCAAGGACGTCACGAACCGA |
| | AAGGGAATTCCGCTCCCGCCTGGCGAGGAGTGGAAGCATGAAGGGGAGGCGCAA |
| | ACCGATTTCAACGGTGACGGCTTCATCACCGTCTTCCCGACCGTGAATGTTCCGGC |
| | GAAGTGGAAGAAGGCGAAGAAGTACACGGAGGCTTTCTACAAGGCGGTTGATACT |
| | GCTTGCTTCTATGGACGCGAAAGCTGTGCGGATCCGGAGTACCCTTCGCGGGCGCA |
| | TAGCATCAACAACTGGAAGGGAAAGGCATGCAAAGCCGTAGGGGGAAAATGCCC |
| | TGAGAGGTTGTCGTGGGGGGAGGGTCCGGCGTTCGCTGGTGGCTTCGCGATAGCA |
| | GCGGAAGAGTATGCGGGGAGAGGGGGCTACCGGGGCGGTGGGGCGAGGAGGGGG |
| | TCGCCCTGTAAGTGCTTCCTTGCCGGCACCGAGGTGCTCATGGCGGATGGCAGCAC |
| | TAAAAGTATCGAGGACATCAAGCTCGGTGACGAAGTGGTTGCGACTGATCCGGTA |
| | ACCGGTGAGGCCGGTGCGCACCCTGTCTCGGCGCTGATCGCCACCGAGAACGACA |
| | AGCGTTTCAACGAGCTGGTCATTATCACCAGCGAGGGTGTAGAGCGTCTTACCGCA |
| | ACGCATGAGCACCCCTTCTGGTCGCCATCCGAAGGGGAGTGGTTGGAGGCGGGTG |
| | AGCTGCGCACTGGCATGACGCTGCGCTCCGACTCTGGCGAAACTCTCGTAGTCGCA |
| | GGAAACCGCGCCTTCACCCAGCGAGCCCGGACCTACAACCTCACGGTTGCAGACC |
| | TCCACACGTACTATGTGCTGGCGGGCCAGACTCCGGTACTGGTTCACAATGCAAAC |
| | TGTGGACCTCACCTGAAGGACCTGCAAAAGGACTACCCCCGGCGCACTGTGGGCA |
| | TCCTTGACGTCGGAACTGATCAGCTCCCGATGATTAGCGGCCCAGGTGGCCAGTCG |
| | GGACTTCTCAAGAACCTCCCAGGTCGTACGAAGGCCAACGGGGAGCACGTGGAGA |
| | CTCACGCAGCAGCGTTCTTGCGTATGAACCCGGGTGTCAGAAAGGCCGTGCTCTAC |
| | ATCGACTACCCGACGGGGACCTGCGGAACATGTAGAAGTACATTGCCTGACATGC |
| | TGCCCGAGGGTGTTCAGTTGTGGGTGATCTCGCCGCGTAGGACTGAAAAATTCACG |
| | GGACTTCCTGACTGA [SEQ ID NO: 135] |
| DddA homolog in | >AVT32940.1 hypothetical protein C6361_29650 [Plantactinospora sp. BC1] |
| Plantactinospora | MGDRLPAFVDGGDTLGIFSRGGIERDLASGVAGPASSLPKGTPGFNGLVKSHVEGHAA |
| sp. BC1 | ALMRQNGIPNAELYINRVPCGSGNGCAAMLPHMLPEGATLRVYGPNGYDRTFTGLPD |
| PROTEIN | [SEQ ID NO: 136] |
| DddA homolog in | >C6361_29650 CP028158.1:6764267-6764614 Plantactinospora sp. BC1 |
| Plantactinospora | chromosome, complete genome |
| sp. BC1 | CTGGGTGACCGGCTCCCTGCCTTCGTGGACGGTGGAGACACGTTGGGCATCTTTTC |
| DNA | TCGCGGAGGTATTGAGCGGGACCTCGCCAGCGGAGTTGCGGGTCCTGCAAGTAGC |
| | CTTCCTAAAGGCACGCCTGGCTTCAATGGTCTTGTAAAGAGTCATGTTGAAGGGCA |
| | TGCGGCTGCGCTAATGAGACAAAATGGAATTCCGAACGCTGAGCTGTATATCAAC |
| | AGAGTGCCGTGCGGTTCAGGTAATGGCTGCGCAGCGATGTTGCCGCATATGCTTCC |
| | GGAAGGTGCCACCCTCCGCGTATATGGGCCGAACGGGTACGATAGAACCTTCACT |
| | GGACTTCCGGACTGA [SEQ ID NO: 137] |
| DddA homolog in | >BAJ27137.1 hypothetical protein KSE_13070 [Kitasatospora setae |
| Kitasatospora | KM-6054] |
| setae KM-6054 | MAAVPSAEALAAKRARDTIWTPPNTPLGSQTKSVDGENLVPGRLPGPLEPEPADWTPG |
| PROTEIN | GPASVPAPGSADVTLGFDSAEAAAARKATGGAAPASDGAALRAGSLPVVIGAAKDAK |
| | SGAHRIRVELVDQAKSRAAHLDSPLIALTDTEPDTPPSGRTTKVSLDLKGIGAQTWAD |
| | RARLVALPACALETPDRPECQQQTPVQSSVDLRSGLLTAEVILPAATEGTAPPTKSSLG |
| | SGTASGVVQAGLTTAAPAKAAPTVLAATAGASGSGGSFSATSLSPSAAWGAGSNVGN |
| | FTYSYPIQTPPSLGGTAPSVGLGYDSSAVDGKTSAQNSQSSWLGEGWGYEAGFIERGY |
| | KSCNTAGIANSSDMCWGGQNATLSLAGHSGTLVRDDTTGVWHLQSDDGTKIEQLTG |
| | APNGLQNGEHWRITTTDGTQFYFGRNHLPGGDGTDPASNSAFKEPVYSPKSGDPCYNS |
| | STATGSWCTMGWRWNLDYAVDVHGNLITYTYAQETNYYSRGAGQNSGSGTLTDYT |
| | RAGYLTQIAYGQRLSEQVTAKGAAKAAALITFTAAERCVPSGSITCTEAQRTTANASY |
| | WPDTPLDQVCASTGTCTRAGPTFFTTKRLASLTTQVLVSGAYRTVDTWTLTHSFKDPG |
| | DGNAKSLWLDSIQRTGTNGQTAVTMPPVTFTAVMKPNRVDGDLTLKDGTKVTVTPF |
| | NRPRLQQVTTETGGQINVVYTTSSDAAHPACSRLAGTMPAAADGNTLACAPVKWYLP |
| | GSSSPDPVDDWFNKYLISAVTEQDAISGTTLIKATNYTYNGDAAWHRNDAEFTDAKT |
| | RTWDGFRGYQSVTSTTGSAYPGEAPRTQQTATYLRGMDGDVKADGSTRSVQVANPL |
| | GGPALTDSPWLAGSSFATQTYDQAGGTVISANGSVAGGQQVTATHAQSGGMPALVA |
| | RYPASQVTTTSKSKLSDGTWRTNTTVSTSDPAHANRPLSSDDKGDGTPGAELCSTNGY |
| | ATGTNPMMLNILAERTVTKGACGTPVTSANTVSSARTLYDGKPYGQAGDLAESTSAL |
| | TLDHYDTGGNPVYVHTAASTFDAYGRLTSVSEANGATYDAAGNQLTAPNLTPATTRT |
| | AYTPATGAIATTVTQTTPTGWTTTLTQDPGRAEALVSTDANGRATTQQYDGLGRLTA |
| | AWSPERATNLTPSQKFSYAVNGTTGPSVVTSQWLKEAGGYAYKNELYDGLGRLRQV |
| | QRTSDTYSGRLITDTVYDSHGWPVKTASPYYEKTTAPNSTVYLPQDSQVPAQTWVTF |
| | DGIGRTTRSAFVSYGQQQWATTTAYPGADRTDVTPPNGKYPTSTFTDGRNQVSALWQ |
| | YRTATPTGNPADATVTTYTYDAANRPATRKDAAGNTWSYGYDLRGRQTTVTDPDTG |
| | TTTTAYDVNSRAVSTTDGKGNTLVVSYDLIGRKTGLYQGSIAPANQLAGWTYDTLPG |
| | GKGKPTSSTRYVGGAGGSAYTQAVTGYDAGYRPTGTSVTIPASEGKLAGTYTTGLTY |
| | NPVLGTLKQTDLPAIGAAPAESVMYTYNISGVLQKSYSDTYYVYDVQYDAFGRPVRT |
| | TTGDAGTQVVSTQLDKTDYTYNQAGDVTSVTDVQNGTATDAQCFTYDHLGRLTQA |
| | WTDTAGSTSTTSGTWTDTSGTVHNSGSSQSVPALGACANANGPASTGSPAKLSVGGP |
| | SPYWQSYGYDSTGNRTTLVQHDTTGNTTKDTTTTQTFGPAGSVNTATGAPNTGGGTG |
| | GPHALLTSSTTGPTGTQVTSYQYDQLGNTTAVTETSGTTTLAWNGEDKLASVTKTGQ |
| | AQATSYLYDADGNQLIRRNPGKTTLNLGSDEVTLDTAANSLTDTRYYSAPGGISIART |
| | TGPTGASALAYQASDPHGTANVQINVDAAQTTTRRPTDPFGNPRGTQPAPNTWAGDK |
| | GFVGGTKDDTTGLTNLGAREYQPTTGRFLNPDPLLDAGNPQQWNGYAYSDNDPVNS |
| | SDPSGLITNALADGDTYVARPAAFCVTMSCVEQTSGPGFWEDKRVGDAVFAAVVQA |
| | TTQSNGNGSSQTKKEKGIWGQAWDWTKKNGGAILGALVEGAVFSTCFIGAGFAAPAT |
| | GGITVIAGAAACGAVAGEAGALTTNILTPDADHSVDGITNDMVVGEITGAAVSAASEG |
| | ASSLAKPAVRKLLGMEAEEGLEAAGRAATGPCNSFPAGVTVLLADGTTKPIEQIAQGD |
| | QVTATDPQTGTTQAEPVTDTIIGHDDTEFTDLTLTNDADPRAPPSEITSTTHHPYWNAT |
| | TSRWTDAGDLKPGDHVRTPDGTELTVNTVYSYTTQPRTARNLTVADLHTYYVLAGN |
| | TPVLVHNTGPGCGEPGFVSDAANSLSGRRITTGQIFDASGNPIGPEITSGGGSLADRAQS |
| | YLADSPNIRNLPAKARYASADHVEAQYAVWMRENGVTDASVVINQNYVCGLPLGCQ |
| | AAVPAILPRGSTMTVWYPGSGSPIVLRGVG [SEQ ID NO: 138] |
| DddA homolog in | >KSE_13070 NC_016109.1:1451556-1458878 Kitasatospora setae KM-6054 DNA, |
| Kitasatospora | complete genome |
| setae KM-6054 | GTGCTGGGGACAGCGGCCGCGCTCGCGGTCATGATGTCCATGGCGGCGGTGCCGT |
| DNA | CCGCCGAGGCACTGGCCGCGAAGCGGGCACGCGACACCATCTGGACGCCGCCCAA |
| | CACCCCGCTGGGCAGCCAGACCAAGTCCGTCGACGGCGAGAACCTCGTCCCGGGC |
| | CGCCTGCCCGGCCCCCTGGAGCCGGAACCGGCCGACTGGACACCCGGCGGACCGG |
| | CATCCGTGCCCGCTCCGGGCAGCGCGGACGTCACCCTCGGCTTCGACTCCGCGGAG |
| | GCCGCCGCCGCCCGCAAGGCCACCGGCGGCGCCGCCCCCGCCTCCGACGGCGCGG |
| | CCCTCCGCGCGGGCTCCCTCCCCGTCGTCATCGGCGCGGCGAAGGACGCCAAGAG |
| | CGGCGCCCACCGGATCCGCGTCGAGCTCGTGGACCAGGCCAAGAGCCGTGCCGCA |
| | CACCTCGACAGCCCGCTGATCGCACTCACCGACACCGAGCCGGACACCCCGCCCT |
| | CCGGTCGGACCACGAAGGTGTCCCTCGACCTGAAGGGCATCGGCGCCCAGACCTG |
| | GGCGGACCGCGCGCGACTCGTCGCCCTGCCCGCCTGCGCCCTGGAGACGCCCGAC |
| | AGGCCCGAGTGCCAGCAGCAGACCCCCGTGCAGAGCTCCGTCGACCTGCGCTCCG |
| | GACTGCTGACGGCCGAGGTCATTCTGCCCGCCGCCACCGAGGGCACCGCCCCGCC |
| | CACCAAGAGCTCCCTCGGCTCGGGCACCGCCTCCGGCGTCGTCCAGGCCGGCCTCA |
| | CCACGGCGGCGCCCGCCAAGGCCGCGCCCACGGTGCTCGCCGCGACCGCCGGCGC |
| | GTCCGGCTCGGGCGGCAGCTTCTCGGCGACCTCGCTGTCGCCCTCCGCGGCCTGGG |
| | GCGCCGGCTCCAACGTCGGCAACTTCACCTACTCGTACCCGATCCAGACGCCTCCC |
| | TCGCTCGGCGGGACCGCCCCCTCCGTGGGCCTCGGGTACGACTCGTCCGCCGTCGA |
| | CGGGAAGACCTCCGCGCAGAACTCCCAGTCCTCCTGGCTCGGCGAGGGCTGGGGC |
| | TACGAGGCCGGGTTCATCGAGCGCGGCTACAAGTCCTGCAACACGGCCGGCATCG |
| | CGAACTCCTCGGACATGTGCTGGGGGGGGCAGAACGCCACCCTCTCGCTGGCCGG |
| | CCACTCCGGCACCCTGGTGCGCGACGACACCACCGGCGTCTGGCACCTGCAGAGC |
| | GACGACGGCACGAAGATCGAACAGCTCACCGGCGCGCCCAACGGCCTGCAGAAC |
| | GGCGAGCACTGGCGGATCACCACGACCGACGGCACGCAGTTCTACTTCGGCCGCA |
| | ACCACCTGCCCGGCGGCGACGGCACCGACCCGGCGAGCAACTCCGCCTTCAAGGA |
| | ACCGGTGTACTCGCCCAAGAGCGGCGACCCCTGCTACAACTCCTCCACCGCCACCG |
| | GCTCCTGGTGCACGATGGGCTGGCGCTGGAACCTCGACTACGCCGTCGACGTCCAC |
| | GGCAACCTGATCACCTACACCTACGCCCAGGAGACCAACTACTACAGCCGAGGCG |
| | CCGGCCAGAACAGCGGCAGCGGCACCCTGACCGACTACACCCGCGCCGGCTACCT |
| | CACCCAGATCGCCTACGGCCAGCGCCTGAGCGAGCAGGTCACCGCCAAGGGCGCG |
| | GCCAAGGCCGCTGCCCTCATCACCTTCACCGCCGCGGAACGCTGCGTCCCGTCCGG |
| | CTCGATCACCTGCACCGAGGCACAGCGCACGACCGCGAACGCCTCGTACTGGCCG |
| | GACACCCCGCTCGACCAGGTCTGCGCCTCCACCGGCACCTGCACCCGGGCCGGCC |
| | CGACGTTCTTCACCACCAAGCGCCTCGCCTCCCTCACCACCCAGGTCCTGGTCTCC |
| | GGCGCCTACCGCACCGTCGACACCTGGACGCTCACCCATTCCTTCAAGGACCCGGG |
| | CGACGGCAACGCCAAGTCGCTGTGGCTCGACTCGATCCAGCGCACCGGCACCAAC |
| | GGGCAGACCGCGGTCACCATGCCGCCCGTCACCTTCACGGCGGTGATGAAGCCGA |
| | ACCGGGTGGACGGGGACCTCACCCTCAAGGACGGCACCAAGGTCACCGTCACCCC |
| | GTTCAACCGGCCCCGCCTCCAGCAGGTCACCACGGAGACCGGCGGCCAGATCAAC |
| | GTCGTCTACACCACCTCCTCCGACGCCGCGCACCCCGCCTGCTCGCGCCTGGCCGG |
| | CACCATGCCCGCCGCGGCGGACGGCAACACCCTCGCCTGCGCCCCCGTCAAGTGG |
| | TACCTGCCCGGATCCAGCTCCCCGGACCCGGTCGACGACTGGTTCAACAAGTACCT |
| | GATCAGCGCCGTCACCGAACAGGACGCGATCAGCGGCACCACCCTGATCAAGGCC |
| | ACCAACTACACCTACAACGGCGACGCCGCCTGGCACCGCAACGACGCCGAGTTCA |
| | CCGACGCCAAGACCCGCACCTGGGACGGCTTCCGCGGCTACCAGTCCGTCACCAG |
| | CACCACCGGCAGCGCCTACCCGGGCGAGGCCCCCAGGACCCAGCAGACCGCGACC |
| | TACCTGCGCGGCATGGACGGCGACGTCAAGGCCGACGGCTCCACCCGCAGCGTCC |
| | AGGTCGCCAACCCGCTCGGCGGCCCGGCCCTCACCGACAGCCCGTGGCTGGCCGG |
| | CTCCAGCTTCGCCACCCAGACCTACGACCAGGCCGGCGGCACCGTCATCTCCGCCA |
| | ACGGCTCCGTCGCCGGCGGCCAGCAGGTCACCGCCACCCACGCCCAGAGCGGCGG |
| | CATGCCGGCCCTGGTCGCCCGCTACCCCGCCTCCCAGGTCACCACCACCTCCAAGT |
| | CCAAGCTCTCCGACGGGACCTGGCGCACCAACACCACCGTCAGCACCAGCGACCC |
| | CGCGCACGCCAACCGCCCCCTCAGCAGCGACGACAAGGGCGACGGCACCCCCGGC |
| | GCCGAACTGTGCAGCACCAACGGCTACGCCACCGGCACCAACCCGATGATGCTGA |
| | ACATCCTCGCCGAGCGGACGGTCACCAAGGGCGCCTGCGGCACCCCCGTGACCTC |
| | GGCCAACACCGTCTCCTCCGCCCGCACCCTCTACGACGGCAAGCCCTACGGCCAG |
| | GCCGGCGACCTCGCCGAGTCCACCAGCGCCCTGACCCTGGACCACTACGACACCG |
| | GCGGCAACCCCGTCTACGTCCACACCGCCGCCTCCACCTTCGACGCCTACGGCCGG |
| | CTTACCAGCGTCAGCGAGGCCAACGGCGCCACCTACGACGCCGCGGGCAACCAGC |
| | TCACCGCGCCCAACCTCACCCCCGCCACCACCCGCACCGCCTACACCCCGGCCACC |
| | GGCGCCATCGCCACCACCGTCACCCAGACCACGCCCACCGGCTGGACCACCACCC |
| | TCACCCAGGACCCGGGCCGCGCCGAAGCTCTGGTCTCCACCGACGCCAACGGCCG |
| | CGCCACCACCCAGCAGTACGACGGCCTCGGCCGCCTGACCGCCGCCTGGTCACCG |
| | GAGCGCGCGACCAACCTCACCCCCAGCCAGAAGTTCTCCTACGCGGTCAACGGCA |
| | CCACCGGCCCCTCCGTCGTCACCTCCCAGTGGCTCAAGGAAGCCGGCGGCTACGC |
| | GTACAAGAACGAGCTGTACGACGGCCTCGGCCGCCTGCGCCAGGTCCAGCGCACC |
| | AGCGACACCTACTCCGGGCGGCTGATCACCGACACCGTCTACGACTCGCACGGCT |
| | GGCCCGTCAAGACCGCCAGCCCGTACTACGAGAAGACCACCGCGCCCAACAGCAC |
| | CGTCTACCTGCCGCAGGACTCCCAGGTGCCCGCCCAGACCTGGGTCACCTTCGACG |
| | GCATCGGCCGGACCACCCGCTCCGCGTTCGTCTCCTACGGACAGCAGCAGTGGGC |
| | CACCACCACCGCCTACCCCGGCGCCGACCGCACCGACGTCACCCCGCCCAACGGC |
| | AAATACCCGACCAGCACCTTCACCGACGGCCGCAACCAGGTCAGCGCCCTGTGGC |
| | AGTACCGCACCGCCACCCCCACCGGCAACCCGGCCGACGCGACCGTCACCACCTA |
| | CACCTACGACGCCGCCAACCGGCCCGCCACCCGCAAGGACGCCGCCGGGAACACC |
| | TGGAGCTACGGCTACGACCTGCGCGGCCGCCAGACCACCGTCACCGACCCCGACA |
| | CCGGCACCACCACCACCGCCTACGACGTCAACTCGCGCGCCGTCTCCACCACCGAC |
| | GGCAAGGGCAACACCCTCGTCGTCAGCTACGACCTGATCGGCCGCAAGACCGGCC |
| | TCTACCAGGGCAGCATCGCCCCGGCCAACCAGCTCGCCGGCTGGACGTACGACAC |
| | CCTGCCGGGCGGAAAGGGCAAGCCCACCTCCTCCACCCGCTACGTCGGGGGCGCC |
| | GGCGGCTCGGCCTACACCCAGGCCGTCACCGGCTACGACGCCGGCTACCGGCCCA |
| | CCGGCACCTCGGTGACGATCCCCGCCAGCGAAGGCAAGCTCGCCGGTACCTACAC |
| | CACCGGCCTGACGTACAACCCGGTCCTCGGCACGCTCAAGCAGACCGACCTGCCG |
| | GCCATCGGCGCGGCGCCCGCCGAGAGCGTCATGTACACCTACAACATCTCCGGCG |
| | TCCTGCAGAAGTCCTACAGCGACACCTACTACGTCTACGACGTGCAGTACGACGCC |
| | TTCGGCCGCCCGGTCCGCACGACCACCGGCGACGCCGGAACCCAGGTCGTCTCCA |
| | CCCAGCTCGACAAGACCGACTACACCTACAACCAGGCCGGCGACGTCACCTCGGT |
| | CACCGACGTCCAGAACGGCACCGCCACCGACGCCCAGTGCTTCACCTACGACCAC |
| | CTCGGGCGCCTCACCCAGGCCTGGACCGACACCGCGGGCTCCACCAGCACCACCA |
| | GCGGCACCTGGACCGACACCTCCGGCACCGTCCACAACAGCGGCTCCTCCCAGTC |
| | CGTCCCCGCACTCGGCGCCTGCGCCAACGCCAACGGCCCCGCCAGCACCGGCAGC |
| | CCCGCCAAGCTCTCCGTCGGCGGCCCCTCCCCGTACTGGCAGAGCTACGGCTACGA |
| | CAGCACCGGCAACCGCACCACCCTCGTCCAGCACGACACCACCGGCAACACCACC |
| | AAGGACACCACCACCACCCAGACCTTCGGCCCCGCCGGATCGGTCAACACCGCCA |
| | CCGGCGCCCCCAACACCGGCGGCGGCACCGGCGGCCCGCACGCCCTGCTCACCAG |
| | CAGCACCACCGGACCCACCGGGACCCAGGTCACCAGCTACCAGTACGACCAGCTC |
| | GGCAACACCACCGCGGTCACCGAGACGTCCGGAACCACCACCCTCGCCTGGAACG |
| | GCGAGGACAAGCTCGCCTCCGTCACCAAGACCGGCCAGGCCCAGGCCACCAGCTA |
| | CCTCTACGACGCCGACGGCAACCAGCTCATCCGCCGCAACCCCGGCAAGACCACC |
| | CTCAACCTCGGCAGCGACGAGGTCACCCTCGACACCGCCGCCAACTCCCTCACCG |
| | ACACCCGCTACTACAGCGCCCCCGGCGGCATCAGCATCGCCCGCACCACCGGACC |
| | CACCGGCGCAAGCGCCCTCGCCTACCAGGCCTCCGACCCCCACGGCACCGCCAAC |
| | GTCCAGATCAACGTCGACGCCGCCCAGACCACCACCCGCCGCCCCACCGACCCCTT |
| | CGGCAACCCCCGCGGCACCCAGCCCGCCCCCAACACCTGGGCCGGCGACAAGGGC |
| | TTCGTCGGCGGCACCAAGGACGACACCACCGGACTCACCAACCTCGGCGCCCGCG |
| | AATACCAACCCACCACCGGCCGCTTCCTCAACCCCGACCCACTCCTCGACGCCGGC |
| | AACCCCCAGCAGTGGAACGGCTACGCCTACAGCGACAACGACCCCGTCAACAGCT |
| | CCGACCCCAGCGGACTCATCACCAACGCCCTGGCCGACGGCGACACCTACGTCGC |
| | CCGCCCCGCCGCCTTCTGCGTCACCATGTCGTGCGTCGAGCAGACCAGCGGCCCCG |
| | GTTTCTGGGAGGACAAGCGCGTCGGTGACGCCGTCTTCGCCGCCGTCGTCCAGGCC |
| | ACCACGCAGAGCAACGGCAACGGGTCATCCCAGACCAAGAAAGAGAAGGGCATC |
| | TGGGGCCAGGCCTGGGACTGGACCAAGAAGAACGGCGGCGCCATCCTCGGAGCGC |
| | TGGTAGAGGGAGCGGTCTTCAGCACATGCTTCATCGGAGCTGGATTCGCCGCACCT |
| | GCAACGGGAGGAATCACCGTCATCGCCGGTGCTGCGGCCTGCGGGGCTGTGGCCG |
| | GCGAGGCAGGGGCACTGACCACCAATATCCTCACCCCAGATGCCGACCACTCCGT |
| | CGACGGCATCACCAACGACATGGTCGTTGGTGAAATCACCGGGGCGGCTGTCAGC |
| | GCAGCGAGCGAGGGCGCAAGCTCCCTCGCCAAGCCGGCGGTCCGCAAACTCCTGG |
| | GCATGGAAGCCGAGGAAGGACTCGAGGCAGCAGGCCGCGCCGCCACCGGACCTT |
| | GCAACAGTTTCCCGGCCGGCGTCACCGTCCTCCTCGCCGACGGCACCACCAAGCCC |
| | ATCGAACAGATCGCCCAGGGCGACCAGGTAACCGCCACCGACCCGCAGACAGGCA |
| | CCACCCAGGCAGAACCCGTCACCGACACGATCATCGGCCACGACGACACGGAATT |
| | CACCGACCTCACCCTCACCAACGACGCAGACCCCCGCGCCCCGCCCAGCGAGATC |
| | ACCTCCACCACCCACCACCCCTACTGGAACGCCACCACCAGCCGCTGGACCGATG |
| | CCGGCGACCTCAAGCCCGGCGACCACGTCCGCACCCCCGACGGCACCGAACTGAC |
| | CGTCAACACCGTCTACAGCTACACCACACAACCCCGGACCGCGCGCAACCTCACC |
| | GTCGCAGACCTCCACACGTACTATGTGCTCGCTGGAAATACGCCGGTCCTAGTGCA |
| | TAACACCGGCCCGGGATGTGGTGAGCCGGGATTCGTTAGTGACGCTGCTAATTCTC |
| | TCTCGGGCAGGCGCATCACCACGGGACAAATATTTGATGCGAGCGGGAATCCGAT |
| | CGGGCCTGAGATCACGAGCGGCGGCGGCAGTCTGGCAGATAGGGCGCAGAGTTAT |
| | CTTGCCGACTCCCCTAATATTCGAAATCTGCCCGCTAAGGCGAGATATGCGTCGGC |
| | TGACCACGTTGAGGCGCAATATGCAGTGTGGATGCGAGAAAATGGAGTGACCGAC |
| | GCCAGTGTGGTCATCAATCAAAACTATGTATGTGGGCTGCCCCTAGGCTGCCAGGC |
| | GGCGGTGCCCGCTATCCTCCCTCGCGGCTCGACCATGACGGTATGGTATCCAGGGT |
| | CAGGAAGTCCCATCGTATTGCGGGGAGTGGGTTAA [SEQ ID NO: 139] |
| DddA homolog in | >ATE59819.1 type IV secretion protein Rhs [Thauera sp. K11] |
| Thauera sp. K11 | MRAFRLIACLLAFSAAAAPAAADTSSMLGRLPEASARQLKERLAPRGLASAAALRQY |
| PROTEIN | LDASQRELDTAPEADDVPARSQRFAARAGELTALREQARRDLASLEDAAKASGSAEA |
| | TQRIGRIRGQVDARFDRLEGLFTTWRNAPQGSERRQARRELRAALATLRHAGTPAPAA |
| | IPVPTLGPLQPAGEPAANPPAARLPAYAQADDATGDPFTPGGFRLMKVAALPPAVAAE |
| | AATDCSATSADLADDGKDVRLTQPIRDLAASLDYSPARILRWTQQNVAFEPYWGALK |
| | GAEGVLQTRAGNSTDQASLLIALLRASNIPARYVRGTVQLNDTAAQDDAGGRAQRW |
| | LGTKRYRASAAVLAGGGTSAGLQSIDGTVRGIRFSHVWVQACVPHGAYRGARAEAG |
| | GYRWLALDAAVKDHDYQQGIAVDVPLTDAAFYTPYLAARSDQLPHEHFAQKVAEAA |
| | RATDANAALADVPYAGTPRPLRYDVLPGSLPYEVEAFTNWPGLGSSETASLPDAHRH |
| | TFTVTVRNGATTLASAALPYPQNAFKRVTLSYQPTAASQAAWNAWTGDLPAAADGSI |
| | QVVPQIKADGTVLAAGAPANALPLAGVHNVILKVSQGERSGAACINDSGNPADPKDT |
| | DGTCLNKTVYTNIKAGAYHALGLNALHTSNAFLGQRLEALAAGVQAYPVAPTPAAG |
| | AGYEATVGELLHLVLQDYLHQTEQADQRNAALRGFKSVGPYDLGLTASDLETDYLFD |
| | IPVAIKPAGVFVDFKGGLYGFVKLDTTAETAAARAAENVDLAKLSIYSGSALEHHVW |
| | QQALRTDAVSTVRGLQFAAEQGIPLVTFTAANIGQYDSLMQMSGATSMAAYKSAIQN |
| | AVKGSDNGNHGVVTVPRAQIAYADPVDPASKWTGAVYMSQNPVTGEYGAIINGTIAG |
| | GFPLLNSTPFSNLYNFDSFVPNTLLGTNGGAGAVQTLPGGTQGESSWITKAGDPVNML |
| | TGNYTLQARDFTIKGRGGLPIVLERWFNAQNATDGPFGFGWTHSFNHQLRFYGIESGQ |
| | SKVGWVDGTGAQRFYAVAAAGSIAPGTTLAAQAGVFTTLSRLADGRFQVRETNGLT |
| | YSFESLTSPTTPPAAGSEPRARLLAIADRHGNTLTLNYSGSQLASVSDSLGRTVLSFTW |
| | NGNRIGKVKDVSGREVNYAYEDGNGNLTRVTDPLGQATRYSYYTSADGAKLDHALR |
| | RHTLPRGNGMEFEYYAGGQVFRHTPFDTSGNLIPESALTFHYNSYRRESWTVDGRGA |
| | EERFLFDTHGNVIQQTAANGATHTYAYADPNDPHLRTRMTDPVGRVTQYSYTAEGYL |
| | QTLTLPSGAVQAWRDYDAFGQPRRVKDARGNWTLHHYDTAGTRTDSIRVKSGVVPT |
| | VGTAPAAANVVSWIKYQGDSVGNLTGVKRLRDWTGATLGNFASGSGPVVTTTFDAA |
| | RLNVASVGRSGNRNGSQISETSPIFSHDALGRLTGGVDGRWYPVAFDYDVLDRVTRA |
| | TDATGQPRRYAFDVNGNRIGTELIAGGSRIDSSVAAFDVQDRVAHVLDHAGNRVAYA |
| | YDAVGNRVSVESPDGYAIGFDYDLAGRPYSAYDEDGNRVFSAFDVAGRVRAVIDPNG |
| | AATLYDYHGDEQDGRLARVEQPAIPGQNAGRAAETDYDAGGLPIRVRQVSAGGEAR |
| | EGYRFHDELGRVVRSVSAPDDVGQRLQVCYSYDALSNLTQVRAGATTDTTSAACAGS |
| | PAVQLTQSWDDFGNLLTRTDALGRVWKFEYDAHGNLVASQTPEQAKVSTRSTYRYD |
| | PALHGLLAGRSVPGSGSAGQSVSYARNALGQVIRAETRDGAGNLVVAYDYQYDAAH |
| | RVVRIVDSRGGKALDYAWTPAGRLASITLDGHVWRFQYDGVGRLAAIVAPNGATIA |
| | MARDAAGRLTERRWPDGAKSAFDWLPEGSLAAIEHSAGGSALAQFAYAYDAWGNR |
| | TSATETLAGTSRSLAYGYDALDRLKTVTTDGATETHAFDLFGNRTSKTTGGVTTDYLF |
| | DAAHQLTQVQIAGTPTERLAYDDNGNLRKHCVGSPSGSTSDCTGTTVLSLAWNGLDQ |
| | LIQAARTGLPAESYAYDDAGRRVTKAVGSSATHFAYDGPDILAEYASPAGSPTAVYA |
| | HGAGIDEPLLRLTGATSTPAASAHHYAQDGLGSIVAAYGEIGASGPVSAASVSATHSY |
| | SAGSYPPAKLIDGETTGSTGFWAGSSGNFAADPAVITLELGAEKSVSRVRLHRVASYLP |
| | DYVVKDAEVQVRKPDNSWQTVGTLTNNTSEDSPEIVLTGAPGSALRVLVKGVRNGSL |
| | VLMAEVTMSADGGAASVATARYDAWGNVTQASGSIPAFGYTGREPDATGLVYYRAR |
| | YYHPALGRFASRDPLGLAAGINPYAYAGGNPILYNDPDGLLAQLAWNTAASYWGQPI |
| | VQETVATIRNGAAVAAGNFVPDTVNGATGWFEQFLHQESGSFGRMDSWVDVRNPVA |
| | QDVAQDLRGVAAVGLMMTPLRYGRASNASFNPPVANLPLNTGGKTSGMLHIPGQESL |
| | SLTSGIAGPSQVVRGQGLPGFNGNQLTHVEGHAAAYMRTHKVSEAVLDINKAPCTAG |
| | SGGGCNGLLPRMLPEGAHLTIRHPNGVQVYIGTPD [SEQ ID NO: 140] |
| DddA homolog in | >CCZ27_07525 NZ_CP023439.1:1708666-1716450 Thauera sp. K11 chromosome, |
| Thauera sp. K11 | complete genome |
| DNA | ATGCGTGCCTTCCGCCTGATCGCCTGCCTTCTCGCCTTTTCGGCGGCAGCCGCACCT |
| | GCTGCGGCTGACACGTCGTCGATGCTGGGGCGTCTGCCTGAAGCAAGCGCCCGCC |
| | AGCTCAAGGAGCGGTTGGCGCCGCGTGGCCTTGCCTCCGCTGCCGCCTTGCGCCAG |
| | TACCTGGACGCCTCGCAACGCGAGCTGGACACCGCACCGGAAGCGGACGACGTAC |
| | CCGCCCGCAGCCAACGCTTTGCCGCAAGGGCGGGCGAACTCACCGCGCTGCGCGA |
| | ACAGGCGCGCCGGGATCTCGCCAGTCTGGAGGACGCCGCGAAGGCGAGCGGCTCG |
| | GCCGAGGCGACGCAGCGCATCGGTCGAATCCGCGGGCAGGTGGACGCACGCTTCG |
| | ACCGGCTCGAAGGGCTTTTTACCACTTGGCGCAATGCGCCCCAGGGCAGCGAACG |
| | CCGCCAGGCCCGCCGCGAACTGCGTGCCGCGCTCGCCACGCTCCGCCATGCCGGC |
| | ACCCCGGCTCCGGCTGCGATTCCTGTTCCTACCCTCGGCCCCCTGCAACCGGCCGG |
| | CGAGCCGGCTGCCAACCCACCGGCCGCGCGCTTGCCAGCCTATGCGCAAGCGGAT |
| | GACGCGACTGGCGACCCCTTTACCCCCGGTGGCTTCCGGCTGATGAAGGTCGCCGC |
| | ACTGCCGCCGGCGGTCGCGGCCGAGGCGGCAACGGACTGCTCCGCCACCAGCGCC |
| | GACCTGGCCGACGACGGCAAGGACGTGCGCCTGACCCAGCCGATCCGCGACCTCG |
| | CGGCATCGCTCGACTACTCACCGGCACGCATCCTGCGCTGGACGCAGCAGAACGT |
| | CGCCTTCGAACCCTACTGGGGGGCACTCAAGGGGGCGGAAGGCGTGCTGCAGACG |
| | CGCGCCGGCAACAGCACCGACCAGGCCAGCCTGCTGATCGCACTCTTGCGGGCCT |
| | CCAACATTCCCGCCCGCTACGTACGCGGCACCGTGCAGCTCAACGACACTGCCGC |
| | GCAGGACGACGCAGGCGGGCGGGCGCAGCGCTGGCTGGGCACCAAGCGCTACCG |
| | TGCATCGGCCGCGGTACTCGCCGGCGGCGGAACTTCCGCCGGCCTGCAGTCGATC |
| | GACGGCACCGTCCGCGGCATCCGCTTCAGCCATGTCTGGGTCCAGGCCTGCGTTCC |
| | CCATGGCGCTTACCGCGGTGCCCGCGCGGAAGCCGGCGGCTATCGCTGGCTGGCG |
| | CTGGACGCGGCGGTGAAGGACCATGACTACCAGCAGGGCATCGCGGTCGATGTGC |
| | CGCTCACCGATGCCGCGTTCTACACGCCCTATCTGGCGGCGCGCAGCGACCAGTTG |
| | CCGCACGAGCATTTCGCACAGAAGGTGGCGGAGGCGGCGCGTGCGACCGACGCCA |
| | ATGCGGCGCTGGCCGACGTGCCCTACGCCGGTACGCCGCGGCCGCTGCGCTACGA |
| | CGTGCTGCCCGGTTCGCTGCCCTACGAGGTCGAAGCCTTCACCAACTGGCCCGGCC |
| | TCGGTTCGTCCGAAACCGCAAGCCTGCCGGACGCACACCGCCACACCTTCACCGTG |
| | ACGGTCAGGAACGGCGCCACCACGTTGGCGAGCGCCGCGCTGCCCTATCCGCAGA |
| | ACGCCTTCAAGCGCGTCACGCTGTCCTATCAGCCGACTGCCGCCTCGCAGGCGGCC |
| | TGGAACGCCTGGACGGGCGATCTGCCCGCCGCGGCCGACGGCAGCATCCAGGTCG |
| | TGCCGCAGATCAAGGCCGACGGTACCGTGCTCGCCGCAGGTGCGCCCGCCAACGC |
| | GCTGCCGCTCGCCGGCGTGCACAACGTCATCCTCAAGGTCTCGCAGGGCGAGCGC |
| | AGCGGTGCCGCGTGCATCAACGACAGCGGCAACCCCGCCGACCCGAAGGACACCG |
| | ACGGCACCTGCCTCAACAAGACCGTCTACACCAACATCAAGGCCGGCGCCTACCA |
| | CGCCCTGGGCCTGAATGCGCTGCACACCTCGAATGCCTTCCTCGGCCAGCGGCTCG |
| | AAGCGCTGGCGGCCGGCGTGCAGGCCTATCCCGTCGCGCCCACGCCGGCCGCGGG |
| | TGCCGGCTACGAGGCCACGGTCGGTGAATTGCTGCATCTGGTGCTGCAGGACTACC |
| | TGCACCAGACCGAGCAGGCCGACCAGCGCAACGCCGCGTTGCGCGGCTTCAAGAG |
| | CGTGGGGCCGTACGACCTCGGGCTGACCGCGTCCGACCTCGAAACCGACTACCTCT |
| | TCGACATCCCGGTCGCGATCAAGCCGGCCGGCGTGTTCGTGGACTTCAAGGGCGG |
| | CCTCTACGGTTTCGTCAAACTCGATACCACGGCCGAGACGGCCGCGGCACGCGCC |
| | GCCGAAAACGTGGATCTGGCCAAGCTCTCGATCTACTCCGGCTCCGCGCTCGAACA |
| | CCACGTCTGGCAGCAGGCGCTGCGCACCGATGCGGTGTCCACCGTGCGTGGGCTG |
| | CAGTTCGCCGCCGAGCAGGGCATTCCGCTCGTCACCTTCACCGCGGCCAACATCGG |
| | CCAGTACGACAGCCTCATGCAGATGAGCGGCGCCACCAGCATGGCCGCTTACAAG |
| | AGCGCGATCCAGAACGCGGTGAAGGGCTCGGACAACGGCAACCACGGCGTCGTCA |
| | CCGTGCCGCGCGCCCAGATCGCCTACGCCGACCCCGTCGATCCGGCGAGCAAATG |
| | GACCGGCGCGGTCTACATGTCTCAGAACCCCGTCACCGGAGAGTACGGGGCGATC |
| | ATCAACGGCACCATCGCCGGCGGCTTCCCGCTGCTCAACAGCACGCCCTTCAGCAA |
| | TCTCTACAACTTCGATTCCTTCGTGCCCAACACCCTCCTTGGCACGAACGGGGGTG |
| | CCGGTGCGGTGCAGACCCTGCCCGGCGGCACCCAGGGCGAGAGTTCCTGGATCAC |
| | CAAGGCCGGCGACCCGGTGAACATGCTCACCGGCAACTACACGCTGCAGGCACGC |
| | GACTTCACCATCAAGGGCCGGGGCGGACTGCCGATCGTGCTGGAGCGCTGGTTCA |
| | ACGCGCAGAACGCCACCGACGGGCCGTTCGGCTTCGGCTGGACGCACAGCTTCAA |
| | CCATCAGTTGCGTTTCTACGGCATCGAGAGCGGCCAGTCCAAGGTCGGCTGGGTG |
| | GACGGCACTGGCGCCCAGCGCTTCTACGCCGTGGCCGCCGCCGGCAGCATTGCGC |
| | CGGGCACGACGCTGGCCGCGCAGGCCGGGGTGTTCACGACGCTGTCGCGTCTGGC |
| | CGACGGCCGCTTCCAGGTGCGCGAGACCAACGGCCTCACCTACAGCTTCGAATCG |
| | CTCACGAGCCCGACCACCCCGCCGGCCGCGGGCAGCGAACCGCGCGCAAGACTGC |
| | TGGCCATCGCCGACCGCCACGGCAACACCCTGACGCTCAACTACAGCGGCAGCCA |
| | GCTTGCCTCGGTGAGCGACAGCCTCGGCCGCACGGTGCTCAGCTTCACCTGGAACG |
| | GCAACCGCATCGGCAAGGTGAAGGACGTCAGCGGACGGGAAGTGAACTACGCCT |
| | ACGAGGACGGCAACGGCAACCTCACGCGCGTCACCGATCCGCTGGGTCAAGCCAC |
| | GCGCTACAGCTACTACACCAGTGCCGACGGTGCCAAGCTCGACCACGCCCTGCGC |
| | CGCCACACCCTGCCGCGCGGCAACGGCATGGAGTTCGAGTACTACGCCGGTGGCC |
| | AGGTCTTCCGCCACACGCCGTTCGACACCAGCGGCAACCTCATTCCCGAATCGGCG |
| | CTGACCTTCCACTACAACAGTTATCGGCGCGAGAGCTGGACGGTCGATGGCCGCG |
| | GTGCCGAGGAGCGCTTCCTGTTCGACACGCACGGCAACGTGATCCAGCAGACCGC |
| | CGCCAACGGTGCCACCCACACCTACGCGTACGCCGACCCGAACGATCCGCATCTG |
| | CGCACGCGCATGACAGACCCGGTCGGCCGCGTCACCCAGTACAGCTATACCGCCG |
| | AAGGCTATCTGCAGACCCTGACGCTGCCGTCGGGCGCCGTGCAGGCGTGGCGCGA |
| | CTACGACGCCTTCGGCCAGCCCCGCCGCGTCAAGGACGCGCGCGGCAACTGGACG |
| | CTCCACCACTACGACACCGCCGGGACACGGACCGACTCCATCCGGGTCAAATCGG |
| | GCGTGGTCCCCACCGTCGGCACCGCGCCTGCCGCGGCCAACGTCGTTTCCTGGATC |
| | AAGTACCAGGGCGACAGCGTGGGCAACCTCACCGGCGTCAAGCGCCTGCGCGACT |
| | GGACGGGCGCGACCCTGGGCAATTTCGCCAGCGGCAGCGGCCCCGTCGTCACCAC |
| | CACCTTCGATGCGGCCAGGCTCAACGTCGCCAGCGTCGGCCGTAGCGGCAACCGC |
| | AACGGCAGCCAGATCAGCGAGACCAGCCCGATCTTCTCCCACGACGCGCTGGGGC |
| | GCCTCACCGGCGGGGTGGACGGGCGCTGGTATCCGGTCGCCTTCGATTACGACGT |
| | GCTCGACCGCGTCACCCGCGCCACCGACGCCACGGGCCAGCCGCGCCGCTACGCG |
| | TTCGACGTCAACGGCAACCGCATCGGTACGGAGCTGATTGCCGGCGGCAGCCGTA |
| | TCGATTCCTCGGTGGCCGCCTTCGACGTGCAGGACCGCGTCGCCCACGTCCTCGAT |
| | CACGCCGGCAACCGCGTGGCCTACGCCTACGATGCGGTGGGCAACCGGGTGAGCG |
| | TGGAAAGCCCCGACGGCTACGCCATCGGCTTCGACTACGACCTCGCCGGACGGCC |
| | CTATTCGGCCTACGACGAAGACGGCAACCGCGTCTTCTCCGCCTTCGACGTGGCCG |
| | GGCGCGTGCGAGCGGTCATCGACCCCAACGGCGCCGCGACGCTCTACGACTATCA |
| | CGGCGACGAGCAGGACGGGCGTCTCGCGCGCGTGGAGCAGCCCGCCATCCCGGGC |
| | CAGAACGCGGGCCGCGCCGCCGAGACCGACTACGATGCGGGTGGGTTGCCCATCC |
| | GCGTGCGCCAGGTCTCGGCCGGCGGCGAAGCGCGCGAAGGCTACCGTTTCCACGA |
| | CGAGCTTGGCCGCGTGGTGCGCAGCGTCTCCGCGCCGGACGACGTCGGCCAGCGG |
| | CTGCAGGTCTGCTACAGCTACGATGCACTCTCGAACCTCACCCAGGTGCGCGCCGG |
| | CGCCACCACCGACACCACCAGTGCCGCCTGCGCCGGCAGCCCCGCGGTGCAGCTC |
| | ACCCAGAGCTGGGACGACTTTGGCAACCTGCTGACGCGCACCGACGCGCTGGGCC |
| | GGGTGTGGAAGTTCGAGTACGACGCCCACGGCAACCTCGTCGCCAGCCAGACGCC |
| | CGAGCAGGCCAAGGTCTCGACGCGCAGCACCTACCGCTACGATCCGGCGCTGCAC |
| | GGCTTGCTGGCCGGGCGCAGCGTGCCGGGCAGCGGCAGTGCGGGCCAGAGCGTGA |
| | GCTATGCGCGCAACGCGCTCGGCCAGGTCATCCGCGCCGAGACGCGCGACGGCGC |
| | GGGCAACCTCGTCGTCGCCTACGACTACCAGTACGACGCCGCCCACCGTGTGGTGC |
| | GCATCGTCGACAGCCGCGGCGGCAAGGCGCTCGACTACGCCTGGACGCCCGCCGG |
| | GCGGCTGGCGAGCATTACCCTGGACGGCCATGTCTGGCGCTTCCAGTACGACGGC |
| | GTCGGCCGGCTCGCCGCGATCGTCGCGCCCAACGGCGCCACCATAGCGATGGCAC |
| | GCGATGCCGCCGGGCGGCTCACCGAGCGGCGCTGGCCCGACGGCGCGAAGAGCGC |
| | CTTCGACTGGCTGCCCGAAGGCAGCCTCGCCGCCATCGAGCACAGCGCGGGCGGC |
| | AGCGCGCTCGCACAGTTCGCCTATGCCTACGATGCCTGGGGCAACCGCACGAGCG |
| | CCACCGAGACCCTCGCGGGCACCAGCCGCAGCCTCGCCTACGGCTACGACGCGCT |
| | CGACCGCCTGAAGACCGTCACCACCGACGGTGCGACCGAAACCCATGCCTTCGAT |
| | CTCTTCGGCAATCGCACCAGCAAGACCACGGGCGGGGTGACCACCGACTATCTCTT |
| | CGACGCGGCGCACCAGCTCACCCAGGTGCAGATCGCCGGCACCCCCACCGAGCGG |
| | CTCGCCTACGACGACAACGGTAATCTCCGCAAGCACTGCGTCGGCAGTCCGAGTG |
| | GCAGCACCAGCGATTGCACCGGCACCACCGTGCTGAGCCTCGCCTGGAACGGCCT |
| | CGACCAGTTGATCCAGGCCGCCAGGACGGGCCTGCCCGCCGAGTCCTACGCCTAC |
| | GACGATGCCGGGCGGCGTGTCACCAAGGCGGTGGGCAGCAGCGCCACCCACTTCG |
| | CCTACGACGGTCCCGACATCCTGGCCGAGTACGCCAGCCCGGCCGGCAGCCCCAC |
| | CGCCGTCTATGCCCACGGTGCCGGCATCGACGAACCGCTGCTGCGCCTCACCGGCG |
| | CGACGAGCACGCCGGCCGCTTCCGCGCACCACTACGCGCAGGACGGGCTGGGCAG |
| | CATCGTCGCGGCCTATGGCGAGATCGGCGCCAGCGGTCCGGTCAGTGCCGCGAGC |
| | GTATCGGCCACCCACAGTTACAGCGCCGGCAGCTACCCGCCGGCAAAGCTGATCG |
| | ACGGCGAGACGACCGGAAGCACCGGGTTCTGGGCTGGCAGCTCGGGCAACTTCGC |
| | TGCCGATCCAGCCGTGATCACGCTGGAACTGGGTGCGGAGAAAAGCGTGAGCCGC |
| | GTGAGGCTGCACCGGGTGGCCAGCTACCTGCCCGACTACGTGGTCAAGGATGCCG |
| | AGGTGCAGGTCCGAAAACCGGACAATTCGTGGCAGACGGTCGGCACGCTGACAAA |
| | CAACACCAGCGAAGACAGTCCCGAGATCGTGCTCACCGGCGCCCCCGGCAGCGCG |
| | CTGCGCGTGCTCGTCAAGGGCGTGCGCAACGGCAGCCTGGTGCTGATGGCCGAGG |
| | TGACGATGAGTGCGGACGGTGGCGCGGCCAGCGTGGCCACCGCCCGCTACGACGC |
| | CTGGGGCAACGTCACGCAGGCGAGCGGCAGCATCCCGGCCTTCGGCTACACCGGA |
| | CGCGAGCCCGATGCCACGGGCCTGGTCTACTACCGCGCCCGCTACTACCACCCCGC |
| | GCTCGGCCGCTTCGCCAGCCGCGACCCGCTGGGGCTGGCGGCGGGGATCAATCCC |
| | TACGCCTACGCGGGCGGCAATCCCATCCTCTACAACGATCCGGATGGCTTGCTGGC |
| | GCAACTGGCGTGGAATACGGCGGCCAGCTACTGGGGACAGCCGATAGTTCAAGAA |
| | ACGGTCGCCACGATTCGAAATGGGGCCGCAGTGGCCGCTGGCAACTTCGTTCCAG |
| | ACACGGTCAACGGTGCAACAGGTTGGTTTGAGCAGTTCCTGCACCAAGAATCGGG |
| | CTCGTTCGGGCGCATGGACTCGTGGGTGGATGTGCGAAACCCCGTTGCGCAGGAC |
| | GTAGCCCAGGACCTGCGCGGTGTCGCAGCCGTTGGGTTAATGATGACGCCGCTGC |
| | GGTATGGTCGTGCCTCCAACGCGTCTTTCAATCCGCCAGTAGCCAATCTTCCGCTC |
| | AACACTGGAGGAAAAACATCTGGCATGTTGCACATTCCAGGGCAAGAATCACTGT |
| | CGCTCACGAGCGGAATTGCGGGGCCGTCTCAAGTCGTTAGAGGTCAAGGTTTGCC |
| | AGGATTCAACGGTAATCAGTTGACCCATGTGGAAGGTCATGCTGCTGCTTACATGC |
| | GGACTCACAAGGTCTCTGAGGCTGTTCTGGACATAAACAAAGCACCTTGCACCGCT |
| | GGTAGTGGTGGTGGATGTAATGGGTTGCTTCCCCGAATGCTGCCGGAGGGGGCTC |
| | ATTTAACAATTCGACACCCAAATGGTGTTCAAGTTTATATTGGCACTCCTGACTAA |
| | [SEQ ID NO: 141] |
| Chondromyces | >AKT41505.1 type IV secretion protein Rhs [Chondromyces crocatus] |
| crocatus | MSMSASRSQPAFPFVSASSPRPRRRPPFPRALLLLIAVLLVGACGDAGGPLLWSSSSQA |
| PROTEIN | LWEPSPIPPLPPLLCLGPGDGPSPFPPDLTQGTTTAAGTLPGSFSVTSTGEATYTIPVPTL |
| | PGRAGIEPSLAITYDSAQGEGLLGIGFHLQGLSSVDRCPRNVAQDGHIAPVRDAEDDAL |
| | CLDGQRLVPVDPQPGRAPREYRTFPDSFTRVEADFAESEGWPAERGPKRLRAHGKAG |
| | LIYEYGGESSGRVLAQGEAVRSWLLTRLSDRDGNTMAVVYRNDLHAKGYTVEHAPQ |
| | RITYTRHPTVPASRMVEFTYGPLEAADVRVHYARGMELRRSLSLRSIQMFGPGHVLAR |
| | ELRFGYGHGPATGRLRLEAVRECAGDGTCKPPTRFTWHTAGAAGYTQQQTLVEVPLS |
| | ERGTLMTMDVSGDGLDDLVTSDMVVEAGTEEPITRWSVALNRSQELTPGFFEAAVTG |
| | QEQPHFIDAEPPYQPELGTPLDYDHDGRMDLFLHDVHGQSMTWEVLLSNGDGRFTRR |
| | DTGVPRPFTMGMTPAGLRSPDASTHLVDVDGDGMVDLLQCYLSAHEQLWYLHRWT |
| | AAAGGFAPHGDRVHALSSYPCHAELHAVDVDADGRVDLVMQELILVGSQVRAGWQ |
| | YVAFSYELSDGSWTRALTGLRLTPPGDRVFFLDVNGDGLPDAVQSSRDDEQLYTSMNI |
| | GAGFAAPVPSLATPTLGAARFVRFASVLDHNADGRQDLLLAMSDGGSESLPAWKVLQ |
| | ATGEVGPGTFEIVHPGLPMGIVLQQDELPTPDHPLTPRVTDVNGDGAQDLLYAFNNQV |
| | HVFENVLGQEDLLAAVTDGMNAHAPEDAEYLPNVQIRYDHLIDRARTTEGFEDAPGIP |
| | SPEQRTYRPLEQSDEEPCRYPVRCVVGHRRVVSGYVLNNGADRPRTFQVAYRNGRHH |
| | RLGRGFLGFGTRIVRDLDTGAGTAEFYDNVTFDGAFQAFPFRGQVQRSWRWSPSLPL |
| | DAHSAEPASLELLTTRSYAVVIPTQAGTYFTLSLLEGKSRHQGTFSPGSGKTLEEAVRA |
| | LEGDLASRMSDTLRTVSDFDLYGNILAEQTQTEGVDLDLSVTRSFDNDPLSWRLGELT |
| | RETTCSKAGGETQCRVMHRSYDGRGHVRLERVGGEPFDPEMQLDVWFSRDALGNIH |
| | STRSRDGTGQVRASCTSYDALGLMPYAHRNLEGHQSYTRYDPAVGVLRASVDPNGL |
| | VSRWAYDGFGRVTLESLPGRMPTVIRRTWTKDGGAAGNAWNLKIRTASVGGQDETV |
| | QLDGLGREVRWWWQALDVGEEQAPRMMQEVAFDARGEHLAWRSLPIVDPAPPGSV |
| | QVRETWQYDGMGRVLRHVTPWGAATTHEYIGRDEVITAPGQAVTRIASDPLGRPTAV |
| | GDPEGGVSRYTYGPFGGLREVTTPAGAVTLTERDAFGRVRRQVSPDRGVSTAHYDGY |
| | GQKISSLDAAGRAVTTRYDTLGRIFRQVDEDGVTEFRWDDAQHGVGQLALVVSPDGH |
| | RLRYGFDHLGRPATTTLEIGGESFTSRLSYDLSGRLERIEYPSAPGIGSFAIEREYDPHGR |
| | LRALKDAGSGAEFWRATAIDAGNRITGERFGGGTATTLRTFDAARERVSRIETQTAGG |
| | PVQQLSYLWNDRRKLVERSDGLHANVERFRYDLLDRLTCAQFGLINAALCERPFTYG |
| | PDGNLLQKPGVGAYEYDPAQPHAVVRAGSAFYGYDAVGNQTSRPGATIAYTAFDLPK |
| | RIALTSGDTVDFAYDGLQQRVRKTTATQEIASFGEVYERVTDVVTGAVEHRYHVRND |
| | ERVVTLVRRSVAQGTRTLHVHVDHLGSIDVLTDGVTGSVAERRSYDAFGAPRHPDWG |
| | SGQPPSPHELSSLGFTGHEADLDLGLVNMKGRIYDPKLGRFLTPDPLVPRPLFGQSWNS |
| | YSYVLNSPLSLVDPSGFQEQPPATEDGCSQGCTIWVFGPPREPKPPAPPKVVEGNLEDA |
| | AGTGSTQAPVDVGTSGVRSGWSPQLPATLQTLGRGDAIARRIMDGVRIGMARMLLES |
| | AKLGILGGTSRVYVAYTNLTAAWNGYKESGLPGALDAVNPASQMVQAGVEAYEAA |
| | AAEDWEAAGASLFKAGSIGMSILATAVGVGGAITATVGSTAGAAGRAAARAPSLPAY |
| | AGGKTSGVLRTTAGDTALLSGYKGPSASMPRGTPGMNGRIKSHVEAHAAAVMREQG |
| | MKEGTLYINRVPCSGATGCDAMLPRMLPPDAHLRVVGPNGYDQVFVGLPD [SEQ ID |
| | NO: 142] |
| Chondromyces | >CMC5_057130 NZ_CP012159.1:7808731-7815414 Chondromyces crocatus |
| crocatus | strain Cm c5, complete genome |
| DNA | ATGTCCATGTCGGCCTCACGGAGTCAGCCCGCATTCCCCTTCGTGTCGGCCTCCTCT |
| | CCGCGTCCGCGCCGGCGCCCTCCCTTTCCCCGAGCGCTGCTCCTCCTCATCGCCGT |
| | GCTCCTCGTCGGCGCATGCGGCGACGCTGGCGGCCCGCTTCTCTGGTCGAGCAGCT |
| | CCCAGGCCCTCTGGGAACCCTCCCCGATCCCGCCGCTCCCCCCGCTCCTGTGCCTC |
| | GGCCCCGGCGACGGTCCCTCCCCCTTTCCGCCTGACCTTACGCAGGGGACCACCAC |
| | CGCGGCGGGGACCCTGCCAGGGAGCTTTTCGGTCACGAGCACGGGCGAGGCGACG |
| | TACACGATCCCGGTCCCCACGCTGCCTGGCCGTGCCGGCATCGAGCCCTCGCTGGC |
| | GATCACCTACGACAGTGCGCAGGGTGAAGGGCTGCTCGGGATCGGCTTCCACTTG |
| | CAGGGCCTCTCGTCGGTCGATCGCTGCCCCCGGAACGTCGCGCAGGATGGTCACAT |
| | CGCGCCGGTCCGGGATGCCGAGGACGACGCCTTGTGCCTCGATGGGCAGCGGCTC |
| | GTCCCCGTGGACCCGCAGCCAGGGCGTGCGCCGCGGGAATACCGCACGTTCCCGG |
| | ACAGCTTCACGCGCGTCGAGGCCGACTTCGCGGAGAGCGAGGGGTGGCCGGCGGA |
| | GCGTGGGCCGAAGCGGCTGCGGGCGCATGGCAAAGCGGGGCTGATCTACGAATAC |
| | GGTGGAGAATCATCGGGCCGGGTGCTCGCGCAAGGGGAGGCGGTGCGGTCCTGGT |
| | TGCTGACGCGGCTCAGCGACCGGGATGGCAACACGATGGCGGTGGTCTACCGGAA |
| | TGACCTCCACGCGAAGGGCTACACCGTCGAGCACGCGCCGCAGCGGATCACCTAC |
| | ACCAGGCACCCGACTGTGCCGGCCTCGCGCATGGTGGAGTTCACGTACGGGCCGC |
| | TGGAGGCGGCGGACGTGCGCGTACACTATGCCCGCGGGATGGAGCTGCGCCGCTC |
| | GCTGAGCTTGCGCTCGATCCAGATGTTCGGGCCGGGACACGTGCTCGCGAGGGAG |
| | CTGCGCTTCGGTTACGGGCATGGGCCGGCGACGGGTCGCTTGCGACTGGAGGCGG |
| | TTCGGGAGTGCGCAGGTGACGGGACGTGCAAGCCGCCGACACGCTTCACCTGGCA |
| | CACGGCCGGAGCGGCTGGATACACGCAGCAGCAGACACTGGTGGAGGTGCCGCTG |
| | TCGGAGCGCGGCACGTTGATGACGATGGACGTCAGCGGCGATGGCCTCGACGACC |
| | TGGTGACGTCCGACATGGTGGTGGAGGCCGGCACGGAAGAGCCGATCACCCGCTG |
| | GTCGGTCGCGCTCAACCGGAGCCAGGAGCTGACGCCGGGGTTCTTCGAGGCGGCC |
| | GTCACTGGGCAGGAGCAGCCGCATTTCATCGACGCAGAGCCGCCGTACCAGCCGG |
| | AGCTGGGGACGCCGCTCGACTACGACCACGATGGCCGGATGGACCTGTTTCTGCA |
| | CGATGTGCACGGGCAGTCGATGACGTGGGAGGTGCTGCTGTCGAATGGAGATGGG |
| | CGGTTCACGCGGCGGGATACGGGGGTGCCGCGGCCGTTCACGATGGGCATGACGC |
| | CGGCGGGATTGCGCAGCCCGGATGCGTCGACCCATCTGGTGGATGTTGACGGTGA |
| | CGGGATGGTGGACCTGCTGCAGTGCTACCTGAGCGCGCACGAGCAGCTCTGGTAC |
| | TTGCACCGCTGGACGGCAGCGGCGGGGGGCTTCGCGCCGCACGGCGATCGGGTGC |
| | ATGCGCTGAGCTCCTACCCGTGCCACGCCGAGCTGCACGCGGTCGATGTCGACGC |
| | GGATGGGCGGGTGGACCTGGTGATGCAGGAGCTGATCCTCGTCGGGAGCCAGGTG |
| | CGGGCGGGGTGGCAGTACGTGGCGTTCTCGTACGAGCTGTCCGATGGATCGTGGA |
| | CGCGCGCGCTGACGGGGCTGCGGCTCACGCCGCCTGGGGACCGGGTGTTCTTCCTC |
| | GACGTCAACGGCGATGGGCTGCCCGATGCGGTGCAGAGCAGCCGGGACGATGAGC |
| | AGCTGTACACGTCGATGAATATCGGCGCGGGATTCGCGGCGCCGGTACCGAGCCT |
| | GGCGACGCCGACGCTCGGGGCTGCGAGGTTCGTTCGGTTTGCGTCGGTGCTCGATC |
| | ACAACGCGGATGGGCGACAAGACCTGCTGCTGGCCATGAGCGATGGGGGATCGGA |
| | GTCGCTGCCCGCGTGGAAGGTGCTCCAGGCGACGGGGGAGGTCGGTCCGGGGACG |
| | TTCGAGATCGTCCATCCCGGGCTGCCGATGGGCATCGTGCTCCAGCAGGACGAGCT |
| | GCCCACGCCCGACCATCCGCTCACGCCGCGGGTCACTGACGTGAATGGGGATGGG |
| | GCGCAGGATCTGCTCTATGCGTTCAACAACCAGGTCCATGTGTTCGAGAACGTGCT |
| | CGGCCAGGAGGACCTGCTCGCGGCCGTGACCGACGGCATGAATGCGCACGCTCCG |
| | GAGGACGCCGAGTACCTGCCCAACGTGCAGATCCGGTACGACCACCTGATCGATC |
| | GTGCGCGGACGACGGAGGGCTTCGAGGATGCTCCAGGGATCCCGTCACCCGAGCA |
| | GCGCACCTACCGGCCTCTGGAGCAAAGCGATGAGGAGCCCTGCCGCTATCCGGTG |
| | CGGTGCGTGGTCGGGCATCGGCGGGTGGTGAGCGGCTATGTGCTCAACAATGGCG |
| | CGGATCGGCCGCGCACCTTCCAGGTGGCCTACCGCAATGGCCGTCACCATCGCCTG |
| | GGCCGAGGGTTTCTGGGGTTCGGGACGCGGATCGTGCGTGACCTCGATACCGGCG |
| | CGGGGACGGCCGAGTTCTACGACAACGTCACGTTTGATGGCGCCTTCCAGGCCTTC |
| | CCTTTCCGAGGGCAGGTACAGCGCTCGTGGCGCTGGAGTCCGAGCTTGCCGCTGG |
| | ACGCGCATAGCGCGGAGCCGGCGTCCCTCGAGCTGCTGACGACGCGGAGCTACGC |
| | GGTGGTGATCCCCACGCAAGCGGGGACGTACTTCACCCTCTCGCTGCTGGAGGGC |
| | AAGAGCCGTCATCAGGGCACGTTCTCACCGGGGAGTGGGAAAACGCTCGAAGAAG |
| | CCGTGCGCGCTCTGGAAGGAGATCTCGCCTCGCGAATGAGCGACACGCTCCGCAC |
| | CGTCAGCGACTTCGACCTCTACGGGAACATCCTCGCCGAGCAAACGCAGACGGAG |
| | GGCGTCGACCTCGACCTCTCGGTGACGCGCAGCTTCGACAACGACCCGCTCTCCTG |
| | GCGCCTTGGCGAGCTGACGCGAGAGACGACGTGCAGCAAAGCGGGCGGTGAGAC |
| | GCAGTGCCGGGTGATGCACCGGAGCTATGACGGGCGCGGCCACGTTCGCCTGGAG |
| | CGCGTCGGGGGAGAGCCCTTCGACCCGGAGATGCAGCTCGATGTCTGGTTCTCGC |
| | GGGACGCGCTGGGCAACATCCACAGCACCCGGTCACGTGATGGGACGGGGCAGGT |
| | GCGCGCGAGCTGCACCAGCTACGACGCGCTGGGCTTGATGCCTTATGCCCACCGC |
| | AACCTGGAGGGCCACCAGAGCTATACGCGCTACGACCCGGCCGTGGGCGTGCTGC |
| | GGGCGTCGGTGGATCCCAACGGCCTGGTGAGCCGCTGGGCCTACGATGGCTTCGG |
| | GCGGGTGACGCTGGAGAGCCTCCCCGGGCGCATGCCCACCGTCATCCGGCGGACC |
| | TGGACGAAGGACGGCGGAGCGGCTGGCAACGCCTGGAACCTGAAGATCCGCACC |
| | GCCTCGGTGGGGGGCCAGGACGAGACCGTGCAGCTCGATGGTCTCGGGCGGGAGG |
| | TGCGCTGGTGGTGGCAAGCGCTCGACGTGGGGGAAGAGCAAGCGCCGCGGATGAT |
| | GCAGGAGGTCGCCTTCGATGCGCGGGGCGAGCACCTCGCGTGGCGCTCGCTGCCG |
| | ATCGTGGATCCCGCGCCACCAGGCTCGGTGCAGGTGCGAGAGACGTGGCAATACG |
| | ACGGGATGGGGGGGGTGCTCCGGCACGTCACGCCGTGGGGGGCGGCGACGACGC |
| | ACGAGTACATCGGGCGGGACGAGGTCATCACCGCGCCTGGGCAGGCCGTCACCCG |
| | AATCGCCAGCGATCCGCTCGGGAGGCCCACGGCAGTGGGTGATCCCGAAGGTGGC |
| | GTCAGCCGGTACACCTACGGTCCCTTCGGGGGGCTGCGCGAGGTGACCACGCCCG |
| | CTGGTGCCGTGACGCTGACCGAGCGGGATGCGTTTGGCCGCGTGCGACGGCAGGT |
| | GAGCCCGGACCGGGGAGTCTCTACTGCGCACTACGACGGTTACGGGCAGAAGATC |
| | TCATCGCTCGACGCGGCAGGACGCGCGGTCACGACCCGCTACGACACGCTGGGTC |
| | GGATTTTCAGGCAGGTCGACGAAGACGGCGTCACCGAGTTCCGTTGGGATGACGC |
| | GCAGCATGGAGTGGGTCAGCTCGCGCTGGTGGTCAGCCCCGATGGGCATCGGCTG |
| | CGCTACGGCTTCGACCACCTCGGGCGACCAGCGACGACGACGCTGGAGATCGGAG |
| | GGGAAAGCTTCACCAGCCGGCTGTCTTATGATCTGAGCGGCCGGCTCGAGCGGAT |
| | CGAGTACCCGAGCGCGCCGGGGATTGGCAGCTTCGCCATCGAGCGGGAGTACGAT |
| | CCTCACGGGCGGCTGCGGGCGCTGAAGGATGCGGGGTCGGGGGCGGAGTTCTGGC |
| | GAGCCACCGCGATCGATGCGGGGAATCGCATCACGGGGGAGCGCTTCGGTGGGGG |
| | GACCGCCACCACGCTCCGCACGTTCGACGCGGCACGGGAGCGGGTGAGTCGGATC |
| | GAGACGCAGACGGCAGGTGGGCCCGTCCAGCAGCTCTCCTACCTCTGGAACGATC |
| | GCCGCAAGCTCGTCGAGCGCTCCGATGGCCTCCACGCCAACGTCGAGCGCTTTCGT |
| | TACGACCTGCTGGACCGGCTGACGTGCGCGCAGTTCGGGCTGATCAATGCTGCCCT |
| | CTGCGAGCGACCGTTCACCTACGGACCCGACGGCAACCTGCTCCAGAAGCCCGGC |
| | GTCGGTGCCTACGAGTACGACCCCGCGCAGCCCCACGCCGTCGTCCGAGCTGGTA |
| | GCGCGTTCTACGGCTACGACGCCGTCGGCAACCAGACCTCACGACCCGGCGCGAC |
| | CATCGCCTACACCGCGTTCGACCTACCGAAGCGAATCGCGCTCACCAGCGGCGAC |
| | ACCGTCGACTTCGCGTACGACGGCCTCCAGCAGCGGGTGCGCAAGACCACGGCGA |
| | CGCAGGAGATCGCCTCCTTCGGCGAGGTGTACGAGCGCGTGACCGATGTCGTCAC |
| | GGGAGCCGTCGAGCATCGCTACCACGTGCGCAACGACGAGCGCGTCGTCACGCTG |
| | GTGCGGCGCTCGGTCGCGCAAGGCACGCGCACGCTGCATGTCCATGTCGACCACC |
| | TCGGGTCGATCGATGTGCTCACCGACGGTGTGACCGGCAGCGTCGCCGAGCGCCG |
| | CAGCTACGATGCCTTCGGCGCACCGCGCCATCCCGACTGGGGTTCGGGTCAGCCTC |
| | CGTCACCCCACGAGCTGTCGTCGCTTGGCTTCACCGGGCACGAGGCCGACCTCGAC |
| | CTCGGCCTCGTGAACATGAAGGGGCGCATCTACGACCCCAAGCTCGGACGGTTCC |
| | TCACGCCCGATCCGCTCGTGCCGCGGCCTCTCTTCGGGCAGAGCTGGAATAGCTAT |
| | TCGTACGTGCTAAACAGCCCGCTGTCGCTGGTCGATCCCAGTGGGTTTCAAGAGCA |
| | GCCACCTGCGACAGAGGACGGATGCTCGCAGGGCTGCACCATCTGGGTGTTCGGT |
| | CCTCCCCGCGAGCCGAAGCCACCTGCGCCGCCCAAGGTCGTCGAGGGCAACCTGG |
| | AGGACGCCGCTGGCACTGGTTCGACCCAGGCGCCGGTCGATGTCGGGACCTCCGG |
| | GGTCCGTAGCGGATGGAGTCCGCAGCTCCCGGCCACGTTGCAGACCTTGGGCCGT |
| | GGTGACGCCATCGCCAGGCGCATCATGGACGGCGTCCGCATCGGGATGGCCAGGA |
| | TGCTGCTGGAGTCCGCAAAGCTCGGCATCCTGGGCGGCACCAGCCGCGTCTACGTC |
| | GCCTACACCAACCTCACCGCCGCCTGGAATGGCTACAAAGAGAGCGGGCTCCCCG |
| | GCGCTCTCGACGCCGTCAATCCCGCCAGCCAGATGGTCCAAGCCGGCGTGGAGGC |
| | CTACGAGGCTGCCGCCGCAGAGGACTGGGAGGCCGCCGGCGCCAGCTTGTTCAAG |
| | GCCGGGTCGATCGGGATGTCGATCCTGGCGACGGCTGTTGGCGTCGGGGGAGCGA |
| | TCACTGCGACAGTGGGCTCGACGGCAGGAGCGGCGGGGAGGGCAGCCGCAAGAG |
| | CCCCCTCACTCCCTGCATATGCTGGCGGAAAAACGTCGGGAGTACTACGGACCAC |
| | CGCAGGCGATACAGCACTGCTGAGCGGCTACAAGGGGCCGTCCGCATCGATGCCT |
| | CGAGGAACGCCAGGCATGAACGGACGCATCAAGTCGCATGTAGAAGCTCATGCGG |
| | CTGCCGTGATGCGAGAGCAAGGGATGAAGGAAGGAACCCTGTACATCAATCGAGT |
| | CCCCTGCTCTGGCGCCACCGGATGCGACGCGATGCTCCCAAGAATGCTCCCACCAG |
| | ATGCACACCTTCGCGTGGTCGGTCCGAATGGTTACGATCAAGTTTTTGTCGGGCTG |
| | CCCGACTGA [SEQ ID NO: 143] |

[0265] In addition, the disclosure contemplates the use of any variant derived from any starting point DddA amino acid sequence, for example, a PACE-evolved variant of DddA of SEQ ID NO: 25 (corresponding to residues 1290-1427 of canonical DddA):

| | |
|---|---|
| DddA (residues | GSYALGPYQISAPQLPAYNGQTVGTFYYVNDAGGL |
| 1290-1427) or | ESKVFSSGGPTPYPNYANAGHVEGQSALFMRDNGI |
| (DddAtox) | SEGLVFHNNPEGTCGFCVNMTETLLPENAKMTVVP |
| | PEGAIPVKRGATGETKVFTGNSNSPKSPTKGGC |
| | (SEQ ID NO: 25) |

[0266] Exemplary variant DddA fragments derived (e.g., using continuous evolution, such as PANCE or PACE) from SEQ ID NO: 25 can include, for example:

| Mutation(s) | Sequence (relative to DddAtox or wildtype of SEQ ID NO: 25) | SEQ ID NO: |
|---|---|---|
| T1314A/T1380I | GSYALGPYQISAPQLPAYNGQTVGAFYYVNDAGGLESKVFSSGGPTPYP | 28 |
| | NYANAGHVEGQSALFMRDNGISEGLVFHNNPEGTCGFCVNMIETLLPEN | |
| | AKMTVVPPEGAIPVKRGATGETKVFTGNSNSPKSPTKGGC | |
| Q1310R/S1330I/ | GSYALGPYQISAPQLPAYNGRTVGTFYYVNDAGGLESKVFISGGPTPYPN | 29 |
| T1380I | YANAGHVEGQSALFMRDNGISEGLVFHNNPEGTCGFCVNMIETLLPENA | |
| | KMTVVPPEGAIPVKRGATGETKVFTGNSNSPKSPTKGGC | |
| T1380I/T1413I | GSYALGPYQISAPQLPAYNGQTVGTFYYVNDAGGLESKVFSSGGPTPYPN | 30 |
| | YANAGHVEGQSALFMRDNGISEGLVFHNNPEGTCGFCVNMIETLLPENA | |
| | KMTVVPPEGAIPVKRGATGETKVFIGNSNSPKSPTKGGC | |
| T1314A/T1380I/ | GSYALGPYQISAPQLPAYNGQTVGAFYYVNDAGGLESKVFSSGGPTPYP | 31 |
| E1396K | NYANAGHVEGQSALFMRDNGISEGLVFHNNPEGTCGFCVNMIETLLPEN | |
| | AKMTVVPPKGAIPVKRGATGETKVFTGNSNSPKSPTKGGC | |
| Q1310R | GSYALGPYQISAPQLPAYNGRTVGTFYYVNDAGGLESKVFSSGGPTPYPN | 32 |
| | YANAGHVEGQSALFMRDNGISEGLVFHNNPEGTCGFCVNMTETLLPENA | |
| | KMTVVPPEGAIPVKRGATGETKVFTGNSNSPKSPTKGGC | |
| S1330I | GSYALGPYQISAPQLPAYNGQTVGTFYYVNDAGGLESKVFISGGPTPYPN | 33 |
| | YANAGHVEGQSALFMRDNGISEGLVFHNNPEGTCGFCVNMTETLLPENA | |
| | KMTVVPPEGAIPVKRGATGETKVFTGNSNSPKSPTKGGC | |
| Q1310R/S1330I | GSYALGPYQISAPQLPAYNGRTVGTFYYVNDAGGLESKVFISGGPTPYPN | 34 |
| | YANAGHVEGQSALFMRDNGISEGLVFHNNPEGTCGFCVNMTETLLPENA | |
| | KMTVVPPEGAIPVKRGATGETKVFTGNSNSPKSPTKGGC | |
| Q1310R/T1380I | GSYALGPYQISAPQLPAYNGRTVGTFYYVNDAGGLESKVFSSGGPTPYPN | 35 |
| | YANAGHVEGQSALFMRDNGISEGLVFHNNPEGTCGFCVNMIETLLPENA | |
| | KMTVVPPEGAIPVKRGATGETKVFTGNSNSPKSPTKGGC | |
| S1330I/T1380I | GSYALGPYQISAPQLPAYNGQTVGTFYYVNDAGGLESKVFISGGPTPYPN | 36 |
| | YANAGHVEGQSALFMRDNGISEGLVFHNNPEGTCGFCVNMIETLLPENA | |
| | KMTVVPPEGAIPVKRGATGETKVFTGNSNSPKSPTKGGC | |
| T1380I/E1396K | GSYALGPYQISAPQLPAYNGQTVGTFYYVNDAGGLESKVFSSGGPTPYPN | 37 |
| | YANAGHVEGQSALFMRDNGISEGLVFHNNPEGTCGFCVNMIETLLPENA | |
| | KMTVVPPKGAIPVKRGATGETKVFTGNSNSPKSPTKGGC | |
| Q1310R/S1330I/ | GSYALGPYQISAPQLPAYNGRTVGTFYYVNDAGGLESKVFISGGPTPYPN | 38 |
| T1380I/E1396K | YANAGHVEGQSALFMRDNGISEGLVFHNNPEGTCGFCVNMIETLLPENA | |
| | KMTVVPPKGAIPVKRGATGETKVFTGNSNSPKSPTKGGC | |
| Q1310R/T1413I | GSYALGPYQISAPQLPAYNGRTVGTFYYVNDAGGLESKVFSSGGPTPYPN | 39 |
| | YANAGHVEGQSALFMRDNGISEGLVFHNNPEGTCGFCVNMTETLLPENA | |
| | KMTVVPPEGAIPVKRGATGETKVFIGNSNSPKSPTKGGC | |
| S1330I/T1413I | GSYALGPYQISAPQLPAYNGQTVGTFYYVNDAGGLESKVFISGGPTPYPN | 40 |
| | YANAGHVEGQSALFMRDNGISEGLVFHNNPEGTCGFCVNMTETLLPENA | |
| | KMTVVPPEGAIPVKRGATGETKVFIGNSNSPKSPTKGGC | |
| Q1310R/S1330I/ | GSYALGPYQISAPQLPAYNGRTVGTFYYVNDAGGLESKVFISGGPTPYPN | 41 |
| T1413I | YANAGHVEGQSALFMRDNGISEGLVFHNNPEGTCGFCVNMTETLLPENA | |
| | KMTVVPPEGAIPVKRGATGETKVFIGNSNSPKSPTKGGC | |
| Q1310R/T1380I/ | GSYALGPYQISAPQLPAYNGRTVGTFYYVNDAGGLESKVFSSGGPTPYPN | 42 |
| T1413I | YANAGHVEGQSALFMRDNGISEGLVFHNNPEGTCGFCVNMIETLLPENA | |
| | KMTVVPPEGAIPVKRGATGETKVFIGNSNSPKSPTKGGC | |
| S1330I/T1380I/ | GSYALGPYQISAPQLPAYNGQTVGTFYYVNDAGGLESKVFISGGPTPYPN | 43 |
| T1413I | YANAGHVEGQSALFMRDNGISEGLVFHNNPEGTCGFCVNMIETLLPENA | |
| (III) | KMTVVPPEGAIPVKRGATGETKVFIGNSNSPKSPTKGGC | |
| T1380I/E1396K/ | GSYALGPYQISAPQLPAYNGQTVGTFYYVNDAGGLESKVFSSGGPTPYPN | 44 |
| T1413I | YANAGHVEGQSALFMRDNGISEGLVFHNNPEGTCGFCVNMIETLLPENA | |
| | KMTVVPPKGAIPVKRGATGETKVFIGNSNSPKSPTKGGC | |
| Q1310R/S1330I/ | GSYALGPYQISAPQLPAYNGRTVGTFYYVNDAGGLESKVFISGGPTPYPN | 45 |
| T1380I/T1413I | YANAGHVEGQSALFMRDNGISEGLVFHNNPEGTCGFCVNMIETLLPENA | |
| (RIII) | KMTVVPPEGAIPVKRGATGETKVFIGNSNSPKSPTKGGC | |
| Q1310R/S1330I/ | GSYALGPYQISAPQLPAYNGRTVGTFYYVNDAGGLESKVFISGGPTPYPN | 46 |
| T1380I/E1396K/ | YANAGHVEGQSALFMRDNGISEGLVFHNNPEGTCGFCVNMIETLLPENA | |
| T1413I | KMTVVPPKGAIPVKRGATGETKVFIGNSNSPKSPTKGGC | |
| T1314A/G1344R/ | GSYALGPYQISAPQLPAYNGQTVGAFYYVNDAGGLESKVFSSGGPTPYP | 47 |
| V1364M/ | NYANARHVEGQSALFMRDNGISEGLMFHNNPKGTCGFCVNMIETLLPEN | |
| E1370K/T1380I/ | AKMTVVPPEGAIPVKRGATGETKVFIGNSNSPKSPTKGGC | |
| T1413I | | |
| (CC1) | | |
| N1342S/G1344R/ | GSYALGPYQISAPQLPAYNGQTVGTFYYVNDAGGLESKVFSSGGPTPYPN | 48 |
| V1364M/ | YASARHVEGQSALFMRDNGISEGLMFHNNPKGTCGFCVNMIETLLPENA | |
| E1370K/ | | |
| T1380I/T1413I | | |
| (CC2) | | |
| A1341T/N1342S/ | GSYALGPYQISAPQLPAYNGQTVGTFYYVNDAGGLESKVFSSGGPTPYPN | 49 |
| E1370K/T1380I/ | YTSAGHVEGQSALFMRDNGISEGLVFHNNPKGTCGFCVNMIETLLPENA | |
| E1408K | KMTVVPPEGAIPVKRGATGKTKVFTGNSNSPKSPTKGGC | |
| (CC3) | | |
| A1341T/N1342S/ | GSYALGPYQISAPQLPAYNGQTVGTFYYVNDAGGLESKVFSSGGPTPYPN | 50 |
| E1370K/T1380I/ | YTSAGHVEGQSALFMRDNGISEGLVFHNNPKGTCGFCVNMIETLLPENA | |
| E1408K/T1413I | | |
| (CC3a) | | |
| A1341T/N1342S/ | GSYALGPYQISAPQLPAYNGQTVGTFYYVNDAGGLESKVFSSGGPTPYPN | 51 |
| E1370K/T1380I/ | YTSAGHVEGQSALFMRDNGISEGLVFHNNPKGTCGFCVNMIETLLPENA | |
| E1408G/T1413I | | |
| (CC3b) | | |
| T1314/G1344S/ | GSYALGPYQISAPQLPAYNGQTVGAFYYVNDAGGLESKVFSSGGPTPYP | 52 |
| E1370K/T1380I/ | NYANASHVEGQSALFMRDNGISEGLVFHNNPKGTCGFCVNMIETLLPEN | |
| A1398T/T1413I | AKMTVVPPEGTIPVKRGATGETKVFIGNSNSPKSPTKGGC | |
| (GC1) | | |
| T1314/G1344S/ | GSYALGPYQISAPQLPAYNGQTVGAFYYVNDAGGLESKVFSSGGPTPYP | 53 |
| E1370K/T1380I/ | NYANASHVEGQSALFMRDNGISEGLVFHNNPKGTCGFCVNMIETLLPEN | |
| E1396K/A1398T/ | AKMTVVPPKGTIPVKRGATGETKVFIGNSNSPKSPTKGGC | |
| T1413I | | |
| (GC2) | | |
| S1330I/A1341V/ | GSYALGPYQISAPQLPAYNGQTVGTFYYVNDAGGLESKVFISGGPTPYPN | 54 |
| N1342S/E1370K/ | YVSAGHVEGQSALFMRDNGISEGLVFHNNPKGTCGFCVNMIETLLPENA | |
| T1380I/T1413I | KMTVVPPEGAIPVKRGATGETKVFIGNSNSPKSPTKGGC | |
| (GC3) | | |

### II. Programmable DNA Binding Protein

[0267] In various embodiments, the Evolved DddA-containing base editors or the polypeptides that comprise the Evolved DddA-containing base editors (e.g., the pDNAbps and DddA) may include a programmable DNA binding protein, such as a mitoTALE, zinc finger protein, or napDNAbp (e.g., Cas9).

### MitoTALEs and MitoZFs

[0268] In various embodiments, the Evolved DddA-containing base editors or the polypeptides that comprise the Evolved DddA-containing base editors (e.g., the pDNAbps and DddA) may include a mitoTALE as the pDNAbp component.

[0269] MitoTALEs and mitoZFP are known in the art. Each of the proteins may comprise a mitochondrial targeting sequence (MTS) in order to facilitate the translocation of the protein into the mitochondria.

[0270] In one aspect, the methods and compositions described herein involve a TALE protein programmed (e.g., engineered through manipulation of the localization signal in the C-terminus) to localize to the mitochondria (mitoTALE). In some embodiments, the localization signal comprises a sequence to target SOD2. In some embodiments, the LS comprises SEQ ID NO: 13. In some embodiments, the LS comprises a sequence to target Cox8a. In some embodiments, the LS comprises SEQ ID NO.: 14. In some embodiments, the LS comprises a sequence with 75% or greater percent identity (e.g., 80% or greater, 85% or greater, 90% or greater, 95% or greater, 96% or greater, 97% or greater, 98% or greater, 99% or greater, 99.5% or greater, 99.9% or greater percent identity) to SEQ ID NOs.: 13 or 14.

[0271] The mitoTALE is also used to guide the fusion protein to the appropriate target nucleotide in the mtDNA. By using the RVD in the mitoTALE specific sequences can be targeted, which will place the attached DddA proximal to the target nucleotide. As used herein, “proximal” or “proximally” with respect to a target nucleotide shall mean a range of nucleic acids which are arranged consecutively upstream or downstream of the target nucleotide, on either the strand containing the target nucleotide or the strand complementary to the strand containing the target nucleotide, which when targeted and bound by a mitoTALE allow for the dimerization or re-assembly of portions of a DddA to regain, at least partially, the native activity of a full length DddA. Accordingly, the sequence should be selected from a range of nucleotides at or near the target nucleotide, or the nucleotide complementary thereto. In some embodiments, the target nucleic acid sequence is located upstream of the target nucleotide. In some embodiments, the target nucleic acid sequence is between 1 and 40 nucleotides upstream of the target nucleotide. In some embodiments, the target nucleic acid sequence is between 5 and 20 nucleotides upstream of the target nucleotide.

[0272] In some embodiments, a second mitoTALE is used. A second mitoTALE can be used to deliver additional components (e.g., additional DddA, a second portion of a DddA, additional enzymes). In some embodiments, the second mitoTALE is configured to bind a second target nucleic acid sequence. In some embodiments, the second mitoTALE is configured to bind a second target nucleic acid sequence on the nucleic acid strand complementary to the strand containing the target nucleotide. In some embodiments, the second mitoTALE is configured to bind a second target nucleic acid sequence upstream of the nucleotide complementary to the target nucleotide, which complementary nucleotide is on the nucleic acid strand complementary to the strand containing the target nucleotide. In some embodiments, the second target nucleic acid sequence is between 1 and 40 nucleotides upstream of the nucleotide complementary to the target nucleotide, which is on the strand complementary to the strand containing the target nucleotide. In some embodiments, the second target nucleic acid sequence is between 5 and 20 nucleotides upstream of the nucleotide complementary to the target nucleotide, which is on the strand complementary to the strand containing the target nucleotide.

[0273] In some embodiments, a mitoTALE comprises an amino acid sequence selected from any one of the following amino acid sequences, or an amino acid sequence having at least 70%, 75%, 80%, 85%, 90%, 95%, or 99% sequence identity with any one of the following mitoTALE sequences:

| SEQ ID NO: | Sequence | Description |
|---|---|---|
| 1 | MALSRAVCGTSRQLAPVLGYLGSRQKHSLPDYPYDVPDYAGYPYDVPDYAGYPY | Mito 24 |
| | DVPDYAMDIADLRTLGYSQQQQEKIKPKVRSTVAQHHEALVGHGFTHAHIVALSQ | |
| | HPAALGTVAVKYQDMIAALPEATHEAIVGVGKQWSGARALEALLTVAGELRGPPL | |
| | QLDTGQLLKIAKRGGVTAVEAVHAWRNALTGAPLNLTPQQVVAIASNNGGKQAL | |
| | ETVQRLLPVLCQAHGLTPEQVVAIASNIGGKQALETVQALLPVLCQAHGLTPEQVV | |
| | AIASHDGGKQALETVQRLLPVLCQAHGLTPEQVVAIASHDGGKQALETVQRLLPV | |
| | LCQAHGLTPEQVVAIASHDGGKQALETVQRLLPVLCQAHGLTPEQVVAIASHDGG | |
| | KQALETVQRLLPVLCQAHGLTPEQVVAIASHDGGKQALETVQRLLPVLCQAHGLT | |
| | PEQVVAIASNIGGKQALETVQALLPVLCQAHGLTPQQVVAIASNGGGKQALETVQ | |
| | RLLPVLCQAHGLTPQQVVAIASNGGGRPALESIVAQLSRPDPALAALTNDHLVALA | |
| | CLGGRPALDAVKKGLGGSGSYALGPYQISAPQLPAYNGQTVGTFYYVNDAGGLES | |
| | KVFSSGGPTPYPNYANAGHVEGQSALFMRDNGISEGLVFHNNPEGTCGFCVNMTE | |
| | TLLPENAKMTVVPPEG | |
| 2 | MALSRAVCGTSRQLAPVLGYLGSRQKHSLPDYPYDVPDYAGYPYDVPDYAGYPY | Mito 24a |
| | DVPDYATNLSDIIEKETGKQLVIQESILMLPEEVEEVIGNKPESDILVHTAYDESTDE | |
| | NVMLLTSDAPEYKPWALVIQDSNGENKIKMLSGGSGGSGGSTNLSDIIEKETGKQL | |
| | VIQESILMLPEEVEEVIGNKPESDILVHTAYDESTDENVMLLTSDAPEYKPWALVIQ | |
| | DSNGENKIKMLSGGSMDIADLRTLGYSQQQQEKIKPKVRSTVAQHHEALVGHGFT | |
| | HAHIVALSQHPAALGTVAVKYQDMIAALPEATHEAIVGVGKQWSGARALEALLTV | |
| | AGELRGPPLQLDTGQLLKIAKRGGVTAVEAVHAWRNALTGAPLNLTPQQVVAIAS | |
| | NNGGKQALETVQRLLPVLCQAHGLTPEQVVAIASNIGGKQALETVQALLPVLCQA | |
| | HGLTPEQVVAIASHDGGKQALETVQRLLPVLCQAHGLTPEQVVAIASHDGGKQAL | |
| | ETVQRLLPVLCQAHGLTPEQVVAIASHDGGKQALETVQRLLPVLCQAHGLTPEQV | |
| | VAIASHDGGKQALETVQRLLPVLCQAHGLTPEQVVAIASHDGGKQALETVQRLLP | |
| | VLCQAHGLTPEQVVAIASNIGGKQALETVQALLPVLCQAHGLTPQQVVAIASNGG | |
| | GKQALETVQRLLPVLCQAHGLTPQQVVAIASNGGGRPALESIVAQLSRPDPALAAL | |
| | TNDHLVALACLGGRPALDAVKKGLGGSGSYALGPYQISAPQLPAYNGQTVGTFYY | |
| | VNDAGGLESKVFSSGGPTPYPNYANAGHVEGQSALFMRDNGISEGLVFHNNPEGT | |
| | CGFCVNMTETLLPENAKMTVVPPEG | |
| 3 | MALSRAVCGTSRQLAPVLGYLGSRQKHSLPDYPYDVPDYAGYPYDVPDYAGYPY | Mito 24b |
| | DVPDYAMDIADLRTLGYSQQQQEKIKPKVRSTVAQHHEALVGHGFTHAHIVALSQ | |
| | HPAALGTVAVKYQDMIAALPEATHEAIVGVGKQWSGARALEALLTVAGELRGPPL | |
| | QLDTGQLLKIAKRGGVTAVEAVHAWRNALTGAPLNLTPQQVVAIASNNGGKQAL | |
| | ETVQRLLPVLCQAHGLTPEQVVAIASNIGGKQALETVQALLPVLCQAHGLTPEQVV | |
| | AIASHDGGKQALETVQRLLPVLCQAHGLTPEQVVAIASHDGGKQALETVQRLLPV | |
| | LCQAHGLTPEQVVAIASHDGGKQALETVQRLLPVLCQAHGLTPEQVVAIASHDGG | |
| | KQALETVQRLLPVLCQAHGLTPEQVVAIASHDGGKQALETVQRLLPVLCQAHGLT | |
| | PEQVVAIASNIGGKQALETVQALLPVLCQAHGLTPQQVVAIASNGGGKQALETVQ | |
| | RLLPVLCQAHGLTPQQVVAIASNGGGRPALESIVAQLSRPDPALAALTNDHLVALA | |
| | CLGGRPALDAVKKGLGGSGSYALGPYQISAPQLPAYNGQTVGTFYYVNDAGGLES | |
| | KVFSSGGPTPYPNYANAGHVEGQSALFMRDNGISEGLVFHNNPEGTCGFCVNMTE | |
| | TLLPENAKMTVVPPEGSGGSTNLSDIIEKETGKQLVIQESILMLPEEVEEVIGNKPES | |
| | DILVHTAYDESTDENVMLLTSDAPEYKPWALVIQDSNGENKIKMLSGGSGGSGGST | |
| | NLSDIIEKETGKQLVIQESILMLPEEVEEVIGNKPESDILVHTAYDESTDENVMLLTS | |
| | DAPEYKPWALVIQDSNGENKIKML | |
| 4 | MALSRAVCGTSRQLAPVLGYLGSRQKHSLPDYPYDVPDYAGYPYDVPDYAGYPY | Mito 24c |
| | DVPDYATNLSDIIEKETGKQLVIQESILMLPEEVEEVIGNKPESDILVHTAYDESTDE | |
| | NVMLLTSDAPEYKPWALVIQDSNGENKIKMLSGGSMDIADLRTLGYSQQQQEKIK | |
| | PKVRSTVAQHHEALVGHGFTHAHIVALSQHPAALGTVAVKYQDMIAALPEATHEA | |
| | IVGVGKQWSGARALEALLTVAGELRGPPLQLDTGQLLKIAKRGGVTAVEAVHAW | |
| | RNALTGAPLNLTPQQVVAIASNNGGKQALETVQRLLPVLCQAHGLTPEQVVAIAS | |
| | NIGGKQALETVQALLPVLCQAHGLTPEQVVAIASHDGGKQALETVQRLLPVLCQA | |
| | HGLTPEQVVAIASHDGGKQALETVQRLLPVLCQAHGLTPEQVVAIASHDGGKQAL | |
| | ETVQRLLPVLCQAHGLTPEQVVAIASHDGGKQALETVQRLLPVLCQAHGLTPEQV | |
| | VAIASHDGGKQALETVQRLLPVLCQAHGLTPEQVVAIASNIGGKQALETVQALLPV | |
| | LCQAHGLTPQQVVAIASNGGGKQALETVQRLLPVLCQAHGLTPQQVVAIASNGGG | |
| | RPALESIVAQLSRPDPALAALTNDHLVALACLGGRPALDAVKKGLGGSGSYALGP | |
| | YQISAPQLPAYNGQTVGTFYYVNDAGGLESKVFSSGGPTPYPNYANAGHVEGQSA | |
| | LFMRDNGISEGLVFHNNPEGTCGFCVNMTETLLPENAKMTVVPPEG | |
| 5 | MALSRAVCGTSRQLAPVLGYLGSRQKHSLPDYPYDVPDYAGYPYDVPDYAGYPY | Mito 24d |
| | DVPDYAMDIADLRTLGYSQQQQEKIKPKVRSTVAQHHEALVGHGFTHAHIVALSQ | |
| | HPAALGTVAVKYQDMIAALPEATHEAIVGVGKQWSGARALEALLTVAGELRGPPL | |
| | QLDTGQLLKIAKRGGVTAVEAVHAWRNALTGAPLNLTPQQVVAIASNNGGKQAL | |
| | ETVQRLLPVLCQAHGLTPEQVVAIASNIGGKQALETVQALLPVLCQAHGLTPEQVV | |
| | AIASHDGGKQALETVQRLLPVLCQAHGLTPEQVVAIASHDGGKQALETVQRLLPV | |
| | LCQAHGLTPEQVVAIASHDGGKQALETVQRLLPVLCQAHGLTPEQVVAIASHDGG | |
| | KQALETVQRLLPVLCQAHGLTPEQVVAIASHDGGKQALETVQRLLPVLCQAHGLT | |
| | PEQVVAIASNIGGKQALETVQALLPVLCQAHGLTPQQVVAIASNGGGKQALETVQ | |
| | RLLPVLCQAHGLTPQQVVAIASNGGGRPALESIVAQLSRPDPALAALTNDHLVALA | |
| | CLGGRPALDAVKKGLGGSGSYALGPYQISAPQLPAYNGQTVGTFYYVNDAGGLES | |
| | KVFSSGGPTPYPNYANAGHVEGQSALFMRDNGISEGLVFHNNPEGTCGFCVNMTE | |
| | TLLPENAKMTVVPPEGSGGSTNLSDIIEKETGKQLVIQESILMLPEEVEEVIGNKPES | |
| | DILVHTAYDESTDENVMLLTSDAPEYKPWALVIQDSNGENKIKML | |
| 6 | MASVLTPLLLRGLTGSARRLPVPRAKIHSLDYKDHDGDYKDHDIDYKDDDDKMDI | Mito 28 |
| | ADLRTLGYSQQQQEKIKPKVRSTVAQHHEALVGHGFTHAHIVALSQHPAALGTVA | |
| | VKYQDMIAALPEATHEAIVGVGKRGAGARALEALLTVAGELRGPPLQLDTGQLLK | |
| | IAKRGGVTAVEAVHAWRNALTGAPLNLTPQQVVAIASNNGGKQALETVQRLLPVL | |
| | CQAHGLTPEQVVAIASNIGGKQALETVQALLPVLCQAHGLTPQQVVAIASNGGGK | |
| | QALETVQRLLPVLCQAHGLTPQQVVAIASNNGGKQALETVQRLLPVLCQAHGLTP | |
| | QQVVAIASNNGGKQALETVQRLLPVLCQAHGLTPEQVVAIASHDGGKQALETVQR | |
| | LLPVLCQAHGLTPQQVVAIASNGGGKQALETVQRLLPVLCQAHGLTPEQVVAIAS | |
| | NIGGKQALETVQALLPVLCQAHGLTPQQVVAIASNGGGKQALETVQRLLPVLCQA | |
| | HGLTPQQVVAIASNGGGKQALETVQRLLPVLCQAHGLTPQQVVAIASNGGGRPAL | |
| | ESIVAQLSRPDPALAALTNDHLVALACLGGRPALDAVKKGLGGSAIPVKRGATGET | |
| | KVFTGNSNSPKSPTKGGC | |
| 7 | MASVLTPLLLRGLTGSARRLPVPRAKIHSLDYKDHDGDYKDHDIDYKDDDDKTNL | Mito 28a |
| | SDIIEKETGKQLVIQESILMLPEEVEEVIGNKPESDILVHTAYDESTDENVMLLTSDA | |
| | PEYKPWALVIQDSNGENKIKMLSGGSGGSGGSTNLSDIIEKETGKQLVIQESILMLPE | |
| | EVEEVIGNKPESDILVHTAYDESTDENVMLLTSDAPEYKPWALVIQDSNGENKIKM | |
| | LSGGSMDIADLRTLGYSQQQQEKIKPKVRSTVAQHHEALVGHGFTHAHIVALSQHP | |
| | AALGTVAVKYQDMIAALPEATHEAIVGVGKRGAGARALEALLTVAGELRGPPLQL | |
| | DTGQLLKIAKRGGVTAVEAVHAWRNALTGAPLNLTPQQVVAIASNNGGKQALET | |
| | VQRLLPVLCQAHGLTPEQVVAIASNIGGKQALETVQALLPVLCQAHGLTPQQVVAI | |
| | ASNGGGKQALETVQRLLPVLCQAHGLTPQQVVAIASNNGGKQALETVQRLLPVLC | |
| | QAHGLTPQQVVAIASNNGGKQALETVQRLLPVLCQAHGLTPEQVVAIASHDGGKQ | |
| | ALETVQRLLPVLCQAHGLTPQQVVAIASNGGGKQALETVQRLLPVLCQAHGLTPE | |
| | QVVAIASNIGGKQALETVQALLPVLCQAHGLTPQQVVAIASNGGGKQALETVQRL | |
| | LPVLCQAHGLTPQQVVAIASNGGGKQALETVQRLLPVLCQAHGLTPQQVVAIASN | |
| | GGGRPALESIVAQLSRPDPALAALTNDHLVALACLGGRPALDAVKKGLGGSAIPVK | |
| | RGATGETKVFTGNSNSPKSPTKGGC | |
| 8 | MASVLTPLLLRGLTGSARRLPVPRAKIHSLDYKDHDGDYKDHDIDYKDDDDKMDI | Mito 28b |
| | ADLRTLGYSQQQQEKIKPKVRSTVAQHHEALVGHGFTHAHIVALSQHPAALGTVA | |
| | VKYQDMIAALPEATHEAIVGVGKRGAGARALEALLTVAGELRGPPLQLDTGQLLK | |
| | IAKRGGVTAVEAVHAWRNALTGAPLNLTPQQVVAIASNNGGKQALETVQRLLPVL | |
| | CQAHGLTPEQVVAIASNIGGKQALETVQALLPVLCQAHGLTPQQVVAIASNGGGK | |
| | QALETVQRLLPVLCQAHGLTPQQVVAIASNNGGKQALETVQRLLPVLCQAHGLTP | |
| | QQVVAIASNNGGKQALETVQRLLPVLCQAHGLTPEQVVAIASHDGGKQALETVQR | |
| | LLPVLCQAHGLTPQQVVAIASNGGGKQALETVQRLLPVLCQAHGLTPEQVVAIAS | |
| | NIGGKQALETVQALLPVLCQAHGLTPQQVVAIASNGGGKQALETVQRLLPVLCQA | |
| | HGLTPQQVVAIASNGGGKQALETVQRLLPVLCQAHGLTPQQVVAIASNGGGRPAL | |
| | ESIVAQLSRPDPALAALTNDHLVALACLGGRPALDAVKKGLGGSAIPVKRGATGET | |
| | KVFTGNSNSPKSPTKGGCSGGSTNLSDIIEKETGKQLVIQESILMLPEEVEEVIGNKP | |
| | ESDILVHTAYDESTDENVMLLTSDAPEYKPWALVIQDSNGENKIKMLSGGSGGSGG | |
| | STNLSDIIEKETGKQLVIQESILMLPEEVEEVIGNKPESDILVHTAYDESTDENVMLL | |
| | TSDAPEYKPWALVIQDSNGENKIKML | |
| 9 | MASVLTPLLLRGLTGSARRLPVPRAKIHSLDYKDHDGDYKDHDIDYKDDDDKTNL | Mito 28c |
| | SDIIEKETGKQLVIQESILMLPEEVEEVIGNKPESDILVHTAYDESTDENVMLLTSDA | |
| | PEYKPWALVIQDSNGENKIKMLSGGSMDIADLRTLGYSQQQQEKIKPKVRSTVAQ | |
| | HHEALVGHGFTHAHIVALSQHPAALGTVAVKYQDMIAALPEATHEAIVGVGKRGA | |
| | GARALEALLTVAGELRGPPLQLDTGQLLKIAKRGGVTAVEAVHAWRNALTGAPL | |
| | NLTPQQVVAIASNNGGKQALETVQRLLPVLCQAHGLTPEQVVAIASNIGGKQALET | |
| | VQALLPVLCQAHGLTPQQVVAIASNGGGKQALETVQRLLPVLCQAHGLTPQQVVA | |
| | IASNNGGKQALETVQRLLPVLCQAHGLTPQQVVAIASNNGGKQALETVQRLLPVL | |
| | CQAHGLTPEQVVAIASHDGGKQALETVQRLLPVLCQAHGLTPQQVVAIASNGGGK | |
| | QALETVQRLLPVLCQAHGLTPEQVVAIASNIGGKQALETVQALLPVLCQAHGLTPQ | |
| | QVVAIASNGGGKQALETVQRLLPVLCQAHGLTPQQVVAIASNGGGKQALETVQRL | |
| | LPVLCQAHGLTPQQVVAIASNGGGRPALESIVAQLSRPDPALAALTNDHLVALACL | |
| | GGRPALDAVKKGLGGSAIPVKRGATGETKVFTGNSNSPKSPTKGGC | |
| 10 | MASVLTPLLLRGLTGSARRLPVPRAKIHSLDYKDHDGDYKDHDIDYKDDDDKMDI | Mito 28d |
| | ADLRTLGYSQQQQEKIKPKVRSTVAQHHEALVGHGFTHAHIVALSQHPAALGTVA | |
| | VKYQDMIAALPEATHEAIVGVGKRGAGARALEALLTVAGELRGPPLQLDTGQLLK | |
| | IAKRGGVTAVEAVHAWRNALTGAPLNLTPQQVVAIASNNGGKQALETVQRLLPVL | |
| | CQAHGLTPEQVVAIASNIGGKQALETVQALLPVLCQAHGLTPQQVVAIASNGGGK | |
| | QALETVQRLLPVLCQAHGLTPQQVVAIASNNGGKQALETVQRLLPVLCQAHGLTP | |
| | QQVVAIASNNGGKQALETVQRLLPVLCQAHGLTPEQVVAIASHDGGKQALETVQR | |
| | LLPVLCQAHGLTPQQVVAIASNGGGKQALETVQRLLPVLCQAHGLTPEQVVAIAS | |
| | NIGGKQALETVQALLPVLCQAHGLTPQQVVAIASNGGGKQALETVQRLLPVLCQA | |
| | HGLTPQQVVAIASNGGGKQALETVQRLLPVLCQAHGLTPQQVVAIASNGGGRPAL | |
| | ESIVAQLSRPDPALAALTNDHLVALACLGGRPALDAVKKGLGGSAIPVKRGATGET | |
| | KVFTGNSNSPKSPTKGGCSGGSTNLSDIIEKETGKQLVIQESILMLPEEVEEVIGNKP | |
| | ESDILVHTAYDESTDENVMLLTSDAPEYKPWALVIQDSNGENKIKML | |
| 11 | DIADLRTLGYSQQQQEKIKPKVRSTVAQHHEALVGHGFTHAHIVALSQHPAALGT | Right |
| | VAVKYQDMIAALPEATHEAIVGVGKQWSGARALEALLTVAGELRGPPLQLDTGQL | Modified m.13513- |
| | LKIAKRGGVTAVEAVHAWRNALTGAPLNLTPQQVVAIASHDGGKQALETVQRLLP | TALE |
| | VLCQAHGLTPEQVVAIASNGGGKQALETVQRLLPVLCQAHGLTPQQVVAIASNGG | |
| | GKQALETVQRLLPVLCQAHGLTPEQVVAIASNGGGKQALETVQALLPVLCQAHGL | |
| | TPQQVVAIASNNGGKQALETVQRLLPVLCQAHGLTPQQVVAIASNNGGKQALETV | |
| | QRLLPVLCQAHGLTPEQVVAIASNIGGKQALETVQRLLPVLCQAHGLTPQQVVAIA | |
| | SNNGGKQALETVQRLLPVLCQAHGLTPQQVVAIASNGGGKQALETVQRLLPVLCQ | |
| | AHGLTPEQVVAIASNIGGKQALETVQRLLPVLCQAHGLTPEQVVAIASNNGGKQAL | |
| | ETVQRLLPVLCQAHGLTPQQVVAIASNIGGKQALETVQRLLPVLCQAHGLTPQQV | |
| | VAIASNIGGRPALESIVAQLSRPDPALAALTNDHLVALACLGGRPALDAVKKGLG | |
| 12 | DIADLRTLGYSQQQQEKIKPKVRSTVAQHHEALVGHGFTHAHIVALSQHPAALGT | m.8490- |
| | VAVKYQDMIAALPEATHEAIVGVGKQWSGARALEALLTVAGELRGPPLQLDTGQL | Right |
| | LKIAKRGGVTAVEAVHAWRNALTGAPLNLTPQQVVAIASNIGGKQALETVQRLLP | TALE |
| | VLCQAHGLTPEQVVAIASNGGGKQALETVQRLLPVLCQAHGLTPQQVVAIASNNG | |
| | GKQALETVQRLLPVLCQAHGLTPEQVVAIASNNGGKQALETVQALLPVLCQAHGL | |
| | TPQQVVAIASNNGGKQALETVQRLLPVLCQAHGLTPQQVVAIASHDGGKQALETV | |
| | QRLLPVLCQAHGLTPEQVVAIASNGGGKQALETVQRLLPVLCQAHGLTPQQVVAI | |
| | ASNGGGKQALETVQRLLPVLCQAHGLTPQQVVAIASNGGGKQALETVQRLLPVLC | |
| | QAHGLTPEQVVAIASNNGGKQALETVQRLLPVLCQAHGLTPEQVVAIASNNGGKQ | |
| | ALETVQRLLPVLCQAHGLTPQQVVAIASNGGGRPALESIVAQLSRPDPALAALTND | |
| | HLVALACLGGRPALDAVKKGLG | |
| 13 | MLSRAVCGTSRQLAPVLGYLGSRQKHSLPD | SOD2 MLS |
| 14 | MSVLTPLLLRGLTGSARRLPVPRAKIHSL | COX8a |
| | | MLS |
| 15 | ACCACGATCGTTATGCTGATCATACCCTAATGATCCCAGCAAGATAATGTCCTG | SOD2 |
| | TCTTCTAAGATGTGCATCAAGCCTGGTACATACTGAAAACCCTATAAGGTCCTG | 3′UTR |
| | GATAATTTTTGTTTGATTATTCATTGAAGAAACATTTATTTTCCAATTGTGTGAA | |
| | GTTTTTGACTGTTAATAAAAGAATCTGTCAACCATCAAAAAAAAAAAAAAA | |
| 15 | ACCACGATCGTTATGCTGATCATACCCTAATGATCCCAGCAAGATAATGTCCTG | ATP5b |
| | TCTTCTAAGATGTGCATCAAGCCTGGTACATACTGAAAACCCTATAAGGTCCTG | 3′UTR |
| | GATAATTTTTGTTTGATTATTCATTGAAGAAACATTTATTTTCCAATTGTGTGAA | |
| | GTTTTTGACTGTTAATAAAAGAATCTGTCAACCATCAAAAAAAAAAAAAAA | |

[0274] In addition, the mitoTALE and/or mitoZFP may comprising one of the following mitochondrial targeting sequences which help promote mitochondrial localization, or an amino acid or nucleotide sequence having at least 70%, 75%, 80%, 85%, 90%, 95%, or 99% sequence identity with any one of the following sequences:

| SEQ ID NO: | Sequence | Description |
|---|---|---|
| 13 | MLSRAVCGTSRQLAPVLGYLGSRQKHSLPD | SOD2 (mitochondrial |
| | | superoxide dismutase) MTS |
| 14 | MSVLTPLLLRGLTGSARRLPVPRAKIHSL | COX8a (mitochondrial |
| | | cytochrome C oxidase |
| | | subunit 8A) MTS |
| 15 | ACCACGATCGTTATGCTGATCATACCCTAATGATCCCAGCAAGA | SOD2 3′UTR |
| | TAATGTCCTGTCTTCTAAGATGTGCATCAAGCCTGGTACATACT | |
| | GAAAACCCTATAAGGTCCTGGATAATTTTTGTTTGATTATTCATT | |
| | GAAGAAACATTTATTTTCCAATTGTGTGAAGTTTTTGACTGTTA | |
| | ATAAAAGAATCTGTCAACCATCAAAAAAAAAAAAAAA | |
| 15 | ACCACGATCGTTATGCTGATCATACCCTAATGATCCCAGCAAGA | ATP5b 3′UTR |
| | TAATGTCCTGTCTTCTAAGATGTGCATCAAGCCTGGTACATACT | |
| | GAAAACCCTATAAGGTCCTGGATAATTTTTGTTTGATTATTCATT | |
| | GAAGAAACATTTATTTTCCAATTGTGTGAAGTTTTTGACTGTTA | |
| | ATAAAAGAATCTGTCAACCATCAAAAAAAAAAAAAAA | |

[0275] In various embodiments, the Evolved DddA-containing base editors may comprises a mitoZF. A mitoZF may be a ZF protein comprising one or more mitochondrial localization sequences (MLS). A zinc finger is a small, functional, independently folded domain that coordinates one or more zinc ions to stabilize its structure through cysteine and/or histidine residues. Zinc fingers are structurally diverse and exhibit a wide range of functions, from DNA- or RNA-binding to protein-protein interactions and membrane association. There are more than 40 types of zinc fingers annotated in UniProtKB. The most frequent are the C2H2-type, the CCHC-type, the PHD-type and the RING-type. Examples include Accession Nos. Q7Z142, P55197, Q9P2R3, Q9P2G1, Q9P2S6, Q8IUH5, P19811, Q92793, P36406, 095081, and Q9ULV3, some of which have the following sequences:

Zinc finger protein: Q7Z142-1:
(SEQ ID NO: 406)
MPDFTIIQPDRKFDAAAVAGIFVRSSTSSSFPSASSYIAAKKRKNVDNTS
TRKPYSYKDRKRKNTEEIRNIKKKLFMDLGIVRTNCGIDNEKQDREKAMK
RKVTETIVTTYCELCEQNFSSSKMLLLHRGKVHNTPYIECHLCMKLFSQT
IQFNRHMKTHYGPNAKIYVQCELCDRQFKDKQSLRTHWDVSHGSGDNQAV
LA,

or an amino acid having at least 70%, 75%, 80%, 85%, 90%, 95%, or 99% sequence identity therewith, or fragment thereof.

Zinc finger protein: P55197-4 (isoform-4):
(SEQ ID NO: 407)
MVSSDRPVSLEDEVSHSMKEMIGGCCVCSDERGWAENPLVYCDGHGCSVA
VHQACYGIVQVPTGPWFCRKCESQERAARVRCELCPHKDGALKRTDNGGW
AHVVCALYIPEVQFANVSTMEPIVLQSVPHDRYNKTCYICDEQGRESKAA
TGACMTCNKHGCRQAFHVTCAQFAGLLCEEEGNGADNVQYCGYCKYHFSK
LKKSKRGSNRSYDQSLSDSSSHSQDKHHEKEKKKYKEKDKHKQKHKKQPE
PSPALVPSLTVTTEKTYTSTSNNSISGSLKRLEDTTARFTNANFQEVSAH
TSSGKDVSETRGSEGKGKKSSAHSSGQRGRKPGGGRNPGTTVSAASPFPQ
GSFSGTPGSVKSSSGSSVQSPQDFLSFTDSDLRNDSYSHSQQSSATKDVH
KGESGSQEGGVNSFSTLIGLPSTSAVTSQPKSFENSPGDLGNSSLPTAGY
KRAQTSGIEEETVKEKKRKGNKQSKHGPGRPKGNKNQENVSHLSVSSASP
TSSVASAAGSITSSSLQKSPTLLRNGSLQSLSVGSSPVGSEISMQYRHDG
ACPTTTFSELLNAIHNGIYNSNDVAVSFPNVVSGSGSSTPVSSSHLPQQS
SGHLQQVGALSPSAVSSAAPAVATTQANTLSGSSLSQAPSHMYGNRSNSS
MAALIAQSENNQTDQDLGDNSRNLVGRGSSPRGSLSPRSPVSSLQIRYDQ
PGNSSLENLPPVAASIEQLLERQWSEGQQFLLEQGTPSDILGMLKSLHQL
QVENRRLEEQIKNLTAKKERLQLLNAQLSVPFPTITANPSPSHQIHTFSA
QTAPTTDSLNSSKSPHIGNSFLPDNSLPVLNQDLTSSGQSTSSSSALSTP
PPAGQSPAQQGSGVSGVQQVNGVTVGALASGMQPVTSTIPAVSAVGGIIG
ALPGNQLAINGIVGALNGVMQTPVTMSQNPTPLTHTTVPPNATHPMPATL
TNSASGLGLLSDQQRQILIHQQQFQQLLNSQQLTPEQHQAFLYQLMQHHH
QQHHQPELQQLQIPGPTQIPINNLLAGTQAPPLHTATTNPFLTIHGDNAS
QKVARLSDKTGPVAQEKS,

or an amino acid having at least 70%, 75%, 80%, 85%, 90%, 95%, or 99% sequence identity therewith, or fragment thereof.

Zinc finger protein: Q9P2R3-1 (isoform 1):
(SEQ ID NO: 408)
MAEEEVAKLEKHLMLLRQEYVKLQKKLAETEKRCALLAAQANKESSSESF
ISRLLAIVADLYEQEQYSDLKIKVGDRHISAHKFVLAARSDSWSLANLSS
TKELDLSDANPEVTMTMLRWIYTDELEFREDDVFLTELMKLANRFQLQLL
RERCEKGVMSLVNVRNCIRFYQTAEELNASTLMNYCAEIIASHWDDLRKE
DFSSMSAQLLYKMIKSKTEYPLHKAIKVEREDVVFLYLIEMDSQLPGKLN
EADHNGDLALDLALSRRLESIATTLVSHKADVDMVDKSGWSLLHKGIQRG
DLFAATFLIKNGAFVNAATLGAQETPLHLVALYSSKKHSADVMSEMAQIA
EALLQAGANPNMQDSKGRTPLHVSIMAGNEYVFSQLLQCKQLDLELKDHE
DSTALWLAVQHITVSSDQSVNPFEDVPVVNGTSFDENSFAARLIQRGSHT
DAPDTATGNCLLQRAAGAGNEAAALFLATNGAHVNHRNKWGETPLHTACR
HGLANLTAELLQQGANPNLQTEEALPLPKEAASLTSLADSVHLQTPLHMA
IAYNHPDVVSVILEQKANALHATNNLQIIPDFSLKDSRDQTVLGLALWTG
MHTIAAQLLGSGAAINDTMSDGQTLLHMAIQRQDSKSALFLLEHQADINV
RTQDGETALQLAIRNQLPLVVDAICTRGADMSVPDEKGNPPLWLALANNL
EDIASTLVRHGCDATCWGPGPGGCLQTLLHRAIDENNEPTACFLIRSGCD
VNSPRQPGANGEGEEEARDGQTPLHLAASWGLEETVQCLLEFGANVNAQD
AEGRTPIHVAISSQHGVIIQLLVSHPDIHLNVRDRQGLTPFACAMTFKNN
KSAEAILKRESGAAEQVDNKGRNFLHVAVQNSDIESVLFLISVHANVNSR
VQDASKLTPLHLAVQAGSEIIVRNLLLAGAKVNELTKHRQTALHLAAQQD
LPTICSVLLENGVDFAAVDENGNNALHLAVMHGRLNNIRVLLTECTVDAE
AFNLRGQSPLHILGQYGKENAAAIFDLFLECMPGYPLDKPDADGSTVLLL
AYMKGNANLCRAIVRSGARLGVNNNQGVNIFNYQVATKQLLFRLLDMLSK
EPPWCDGSYCYECTARFGVTTRKHHCRHCGRLLCHKCSTKEIPIIKFDLN
KPVRVCNICFDVLTLGGVS,

or an amino acid having at least 70%, 75%, 80%, 85%, 90%, 95%, or 99% sequence identity therewith, or fragment thereof.

Zinc finger protein: Q9P2G1-1:
(SEQ ID NO: 409)
MGNTTTKFRKALINGDENLACQIYENNPQLKESLDPNTSYGEPYQHNTPL
HYAARHGMNKILGTFLGRDGNPNKRNVHNETSMHLLCMGPQIMISEGALH
PRLARPTEDDFRRADCLQMILKWKGAKLDQGEYERAAIDAVDNKKNTPLH
YAAASGMKACVELLVKHGGDLFAENENKDTPCDCAEKQHHKDLALNLESQ
MVFSRDPEAEEIEAEYAALDKREPYEGLRPQDLRRLKDMLIVETADMLQA
PLFTAEALLRAHDWDREKLLEAWMSNPENCCQRSGVQMPTPPPSGYNAWD
TLPSPRTPRTTRSSVTSPDEISLSPGDLDTSLCDICMCSISVFEDPVDMP
CGHDFCRGCWESFLNLKIQEGEAHNIFCPAYDCFQLVPVDIIESVVSKEM
DKRYLQFDIKAFVENNPAIKWCPTPGCDRAVRLTKQGSNTSGSDTLSFPL
LRAPAVDCGKGHLFCWECLGEAHEPCDCQTWKNWLQKITEMKPEELVGVS
EAYEDAANCLWLLTNSKPCANCKSPIQKNEGCNHMQCAKCKYDFCWICLE
EWKKHSSSTGGYYRCTRYEVIQHVEEQSKEMTVEAEKKHKRFQELDRFMH
YYTRFKNHEHSYQLEQRLLKTAKEKMEQLSRALKETEGGCPDTTFIEDAV
HVLLKTRRILKCSYPYGFFLEPKSTKKEIFELMQTDLEMVTEDLAQKVNR
PYLRTPRHKIIKAACLVQQKRQEFLASVARGVAPADSPEAPRRSFAGGTW
DWEYLGFASPEEYAEFQYRRRHRQRRRGDVHSLLSNPPDPDEPSESTLDI
PEGGSSSRRPGTSVVSSASMSVLHSSSLRDYTPASRSENQDSLQALSSLD
EDDPNILLAIQLSLQESGLALDEETRDFLSNEASLGAIGTSLPSRLDSVP
RNTDSPRAALSSSELLELGDSLMRLGAENDPFSTDTLSSHPLSEARSDFC
PSSSDPDSAGQDPNINDNLLGNIMAWFHDMNPQSIALIPPATTEISADSQ
LPCIKDGSEGVKDVELVLPEDSMFEDASVSEGRGTQIEENPLEENILAGE
AASQAGDSGNEAANRGDGSDVSSQTPQTSSDWLEQVHLV,

or an amino acid having at least 70%, 75%, 80%, 85%, 90%, 95%, or 99% sequence identity therewith, or fragment thereof.

Zinc finger protein: Q8IUH5-1 (isoform 1):
(SEQ ID NO: 409)
MGNTTTKFRKALINGDENLACQIYENNPQLKESLDPNTSYGEPYQHNTPL
HYAARHGMNKILGTFLGRDGNPNKRNVHNETSMHLLCMGPQIMISEGALH
PRLARPTEDDFRRADCLQMILKWKGAKLDQGEYERAAIDAVDNKKNTPLH
YAAASGMKACVELLVKHGGDLFAENENKDTPCDCAEKQHHKDLALNLESQ
MVFSRDPEAEEIEAEYAALDKREPYEGLRPQDLRRLKDMLIVETADMLQA
PLFTAEALLRAHDWDREKLLEAWMSNPENCCQRSGVQMPTPPPSGYNAWD
TLPSPRTPRTTRSSVTSPDEISLSPGDLDTSLCDICMCSISVFEDPVDMP
CGHDFCRGCWESFLNLKIQEGEAHNIFCPAYDCFQLVPVDIIESVVSKEM
DKRYLQFDIKAFVENNPAIKWCPTPGCDRAVRLTKQGSNTSGSDTLSFPL
LRAPAVDCGKGHLFCWECLGEAHEPCDCQTWKNWLQKITEMKPEELVGVS
EAYEDAANCLWLLTNSKPCANCKSPIQKNEGCNHMQCAKCKYDFCWICLE
EWKKHSSSTGGYYRCTRYEVIQHVEEQSKEMTVEAEKKHKRFQELDRFMH
YYTRFKNHEHSYQLEQRLLKTAKEKMEQLSRALKETEGGCPDTTFIEDAV
HVLLKTRRILKCSYPYGFFLEPKSTKKEIFELMQTDLEMVTEDLAQKVNR
PYLRTPRHKIIKAACLVQQKRQEFLASVARGVAPADSPEAPRRSFAGGTW
DWEYLGFASPEEYAEFQYRRRHRQRRRGDVHSLLSNPPDPDEPSESTLDI
PEGGSSSRRPGTSVVSSASMSVLHSSSLRDYTPASRSENQDSLQALSSLD
EDDPNILLAIQLSLQESGLALDEETRDFLSNEASLGAIGTSLPSRLDSVP
RNTDSPRAALSSSELLELGDSLMRLGAENDPFSTDTLSSHPLSEARSDFC
PSSSDPDSAGQDPNINDNLLGNIMAWFHDMNPQSIALIPPATTEISADSQ
LPCIKDGSEGVKDVELVLPEDSMFEDASVSEGRGTQIEENPLEENILAGE
AASQAGDSGNEAANRGDGSDVSSQTPQTSSDWLEQVHLV,

or an amino acid having at least 70%, 75%, 80%, 85%, 90%, 95%, or 99% sequence identity therewith, or fragment thereof.

Zinc finger protein: P36406-1 (isoform alpha):
(SEQ ID NO: 410)
MATLVVNKLGAGVDSGRQGSRGTAVVKVLECGVCEDVFSLQGDKVPRLLL
CGHTVCHDCLTRLPLHGRAIRCPFDRQVTDLGDSGVWGLKKNFALLELLE
RLQNGPIGQYGAAEESIGISGESIIRCDEDEAHLASVYCTVCATHLCSEC
SQVTHSTKTLAKHRRVPLADKPHEKTMCSQHQVHAIEFVCLEEGCQTSPL
MCCVCKEYGKHQGHKHSVLEPEANQIRASILDMAHCIRTFTEEISDYSRK
LVGIVQHIEGGEQIVEDGIGMAHTEHVPGTAENARSCIRAYFYDLHETLC
RQEEMALSVVDAHVREKLIWLRQQQEDMTILLSEVSAACLHCEKTLQQDD
CRVVLAKQEITRLLETLQKQQQQFTEVADHIQLDASIPVTFTKDNRVHIG
PKMEIRVVTLGLDGAGKTTILFKLKQDEFMQPIPTIGFNVETVEYKNLKF
TIWDVGGKHKLRPLWKHYYLNTQAVVFVVDSSHRDRISEAHSELAKLLTE
KELRDALLLIFANKQDVAGALSVEEITELLSLHKLCCGRSWYIQGCDARS
GMGLYEGLDWLSRQLVAAGVLDVA,

or an amino acid having at least 70%, 75%, 80%, 85%, 90%, 95%, or 99% sequence identity therewith, or fragment thereof.

Zinc finger protein: Q9ULV3-1 (isoform-1):
(SEQ ID NO: 411)
MFSQQQQQQLQQQQQQLQQLQQQQLQQQQLQQQQLLQLQQLLQQSPPQAP
LPMAVSRGLPPQQPQQPLLNLQGTNSASLLNGSMLQRALLLQQLQGLDQF
AMPPATYDTAGLTMPTATLGNLRGYGMASPGLAAPSLTPPQLATPNLQQF
FPQATRQSLLGPPPVGVPMNPSQFNLSGRNPQKQARTSSSTTPNRKDSSS
QTMPVEDKSDPPEGSEEAAEPRMDTPEDQDLPPCPEDIAKEKRTPAPEPE
PCEASELPAKRLRSSEEPTEKEPPGQLQVKAQPQARMTVPKQTQTPDLLP
EALEAQVLPRFQPRVLQVQAQVQSQTQPRIPSTDTQVQPKLQKQAQTQTS
PEHLVLQQKQVQPQLQQEAEPQKQVQPQVQPQAHSQGPRQVQLQQEAEPL
KQVQPQVQPQAHSQPPRQVQLQLQKQVQTQTYPQVHTQAQPSVQPQEHPP
AQVSVQPPEQTHEQPHTQPQVSLLAPEQTPVVVHVCGLEMPPDAVEAGGG
MEKTLPEPVGTQVSMEEIQNESACGLDVGECENRAREMPGVWGAGGSLKV
TILQSSDSRAFSTVPLTPVPRPSDSVSSTPAATSTPSKQALQFFCYICKA
SCSSQQEFQDHMSEPQHQQRLGEIQHMSQACLLSLLPVPRDVLETEDEEP
PPRRWCNTCQLYYMGDLIQHRRTQDHKIAKQSLRPFCTVCNRYFKTPRKF
VEHVKSQGHKDKAKELKSLEKEIAGQDEDHFITVDAVGCFEGDEEEEEDD
EDEEEIEVEEELCKQVRSRDISREEWKGSETYSPNTAYGVDFLVPVMGYI
CRICHKFYHSNSGAQLSHCKSLGHFENLQKYKAAKNPSPTTRPVSRRCAI
NARNALTALFTSSGRPPSQPNTQDKTPSKVTARPSQPPLPRRSTRLKT,

or an amino acid having at least 70%, 75%, 80%, 85%, 90%, 95%, or 99% sequence identity therewith, or fragment thereof.

[0276] The present disclosure may use any known or available zinc finger protein, or variant or functional fragment thereof. In some embodiments, a mitoZF comprises an amino acid sequence selected from any one of the following amino acid sequences, or an amino acid sequence having at least 70%, 75%, 80%, 85%, 90%, 95%, or 99% sequence identity with any one of the following mitoZF sequences:

ZF (R8)
(SEQ ID NO: 224)
MAERPFQCDICMRNFSTSGSLSRHIRTHTGEKPFQCDICMRNFSQSGSLT
RHIRTHTGSEKPFQCDICMRNFSRSDALSQHIRTHTGEKPFQCDICMRNF
SRNDNRITHIRTHTGEKPFQCDICMRNFSRSDHLTQHTKIHLR
ZF (5xZnF-4-R8)
(SEQ ID NO: 225)
MAERPFQCDICMRNFSQASNLISHIRTHTGEKPFQCDICMRNFSTSHSLT
EHIRTHTGSEKPFQCDICMRNFSERSHLREHIRTHTGEKPFQCDICMRNF
SQSGNLTEHIRTHTGEKPFQCDICMRNFSSKKALTEHTKIHLR
ZF (5xZnF-10-R8)
(SEQ ID NO: 226)
MAERPFQCDICMRNFSQASNLISHIRTHTGEKPFQCDICMRNFSQRANLR
AHIRTHTGSEKPFQCDICMRNFSQASNLISHIRTHTGEKPFQCDICMRNF
STSHSLTEHIRTHTGEKPFQCDICMRNFSERSHLREHTKIHLR
ZF (R13-1)
(SEQ ID NO: 227)
MAERPFQCDICMRNFSRSDNLSTHIRTHTGEKPFQCDICMRNFSDRSDLS
RHIRTHTGEKPFQCDICMRNFSQSGDLTRHIRTHTGSEKPFQCDICMRNF
SRSDSLSAHIRTHTGEKPFQCDICMRNFSQKATRITHTKIHLR
ZF (5xZnF-9-R13)
(SEQ ID NO: 228)
MAERPFQCDICMRNFSQSSSLVRHIRTHTGEKPFQCDICMRNFSRSDNLV
RHIRTHTGSEKPFQCDICMRNFSQAGHLASHIRTHTGEKPFQCDICMRNF
SRKDNLKNHIRTHTGEKPFQCDICMRNFSRKDALRGHTKIHLR
ZF (5xZnF-12-R13)
(SEQ ID NO: 229)
MAERPFQCDICMRNFSRSDHLTTHIRTHTGEKPFQCDICMRNFSQSSSLV
RHIRTHTGSEKPFQCDICMRNFSRSDNLVRHIRTHTGEKPFQCDICMRNF
SQAGHLASHIRTHTGEKPFQCDICMRNFSRKDNLKNHTKIHLR

### NapDNAbp

[0277] In various embodiments, the Evolved DddA-containing base editors or the polypeptides that comprise the Evolved DddA-containing base editors (e.g., the pDNAbps and DddA) may include a napDNAbp as the pDNAbp component.

[0278] In one aspect, the methods and base editor compositions described herein involve a nucleic acid programmable DNA binding protein (napDNAbp). Each napDNAbp is associated with at least one guide nucleic acid (e.g., guide RNA), which localizes the napDNAbp to a DNA sequence that comprises a DNA strand (i.e., a target strand) that is complementary to the guide nucleic acid, or a portion thereof (e.g., the protospacer of a guide RNA). In other words, the guide nucleic-acid “programs” the napDNAbp (e.g., Cas9 or equivalent) to localize and bind to a complementary sequence. In various embodiments, the napDNAbp can be fused to a herein disclosed adenosine deaminase or cytidine deaminase.

[0279] Without being bound by theory, the binding mechanism of a napDNAbp-guide RNA complex, in general, includes the step of forming an R-loop whereby the napDNAbp induces the unwinding of a double-strand DNA target, thereby separating the strands in the region bound by the napDNAbp. The guideRNA protospacer then hybridizes to the “target strand.” This displaces a “non-target strand” that is complementary to the target strand, which forms the single strand region of the R-loop. In some embodiments, the napDNAbp includes one or more nuclease activities, which then cut the DNA leaving various types of lesions. For example, the napDNAbp may comprises a nuclease activity that cuts the non-target strand at a first location, and/or cuts the target strand at a second location. Depending on the nuclease activity, the target DNA can be cut to form a “double-stranded break” whereby both strands are cut. In other embodiments, the target DNA can be cut at only a single site, i.e., the DNA is “nicked” on one strand. Exemplary napDNAbp with different nuclease activities include “Cas9 nickase” (“nCas9”) and a deactivated Cas9 having no nuclease activities (“dead Cas9” or “dCas9”).

[0280] The below description of various napDNAbps which can be used in connection with the presently disclose base editors is not meant to be limiting in any way. The base editors may comprise the canonical SpCas9, or any ortholog Cas9 protein, or any variant Cas9 protein—including any naturally occurring variant, mutant, or otherwise engineered version of Cas9—that is known or which can be made or evolved through a directed evolutionary or otherwise mutagenic process. In various embodiments, the Cas9 or Cas9 variants have a nickase activity, i.e., only cleave of strand of the target DNA sequence. In other embodiments, the Cas9 or Cas9 variants have inactive nucleases, i.e., are “dead” Cas9 proteins. Other variant Cas9 proteins that may be used are those having a smaller molecular weight than the canonical SpCas9 (e.g., for easier delivery) or having modified or rearranged primary amino acid structure (e.g., the circular permutant formats). The base editors described herein may also comprise Cas9 equivalents, including Cas12a/Cpf1 and Cas12b proteins which are the result of convergent evolution. The napDNAbps used herein (e.g., SpCas9, Cas9 variant, or Cas9 equivalents) may also contain various modifications that alter/enhance their PAM specifies. Lastly, the application contemplates any Cas9, Cas9 variant, or Cas9 equivalent which has at least 70%, at least 75%, at least 80%, at least 85%, at least 90%, at least 91%, at least 92%, at least 93%, at least 94%, at least 95%, at least 96%, at least 97%, at least 98%, at least 99%, or at least 99.9% sequence identity to a reference Cas9 sequence, such as a references SpCas9 canonical sequence or a reference Cas9 equivalent (e.g., Cas12a/Cpf1).

[0281] The napDNAbp can be a CRISPR (clustered regularly interspaced short palindromic repeat)-associated nuclease. As outlined above, CRISPR is an adaptive immune system that provides protection against mobile genetic elements (viruses, transposable elements and conjugative plasmids). CRISPR clusters contain spacers, sequences complementary to antecedent mobile elements, and target invading nucleic acids. CRISPR clusters are transcribed and processed into CRISPR RNA (crRNA). In type II CRISPR systems correct processing of pre-crRNA requires a trans-encoded small RNA (tracrRNA), endogenous ribonuclease 3 (rnc) and a Cas9 protein. The tracrRNA serves as a guide for ribonuclease 3-aided processing of pre-crRNA. Subsequently, Cas9/crRNA/tracrRNA endonucleolytically cleaves linear or circular dsDNA target complementary to the spacer. The target strand not complementary to crRNA is first cut endonucleolytically, then trimmed 3′-5′ exonucleolytically. In nature, DNA-binding and cleavage typically requires protein and both RNAs. However, single guide RNAs (“sgRNA”, or simply “gNRA”) can be engineered so as to incorporate aspects of both the crRNA and tracrRNA into a single RNA species. See, e.g., Jinek M. et al., Science 337:816-821(2012), the entire contents of which is hereby incorporated by reference.

[0282] In some embodiments, the napDNAbp directs cleavage of one or both strands at the location of a target sequence, such as within the target sequence and/or within the complement of the target sequence. In some embodiments, the napDNAbp directs cleavage of one or both strands within about 1, 2, 3, 4, 5, 6, 7, 8, 9, 10, 15, 20, 25, 50,100,200, 500, or more base pairs from the first or last nucleotide of a target sequence. In some embodiments, a vector encodes a napDNAbp that is mutated to with respect to a corresponding wild-type enzyme such that the mutated napDNAbp lacks the ability to cleave one or both strands of a target polynucleotide containing a target sequence. For example, an aspartate-to-alanine substitution (D10A) in the RuvC I catalytic domain of Cas9 from S. pyogenes converts Cas9 from a nuclease that cleaves both strands to a nickase (cleaves a single strand). Other examples of mutations that render Cas9 a nickase include, without limitation, H840A, N854A, and N863A in reference to the canonical SpCas9 sequence, or to equivalent amino acid positions in other Cas9 variants or Cas9 equivalents.

[0283] As used herein, the term “Cas protein” refers to a full-length Cas protein obtained from nature, a recombinant Cas protein having a sequences that differs from a naturally occurring Cas protein, or any fragment of a Cas protein that nevertheless retains all or a significant amount of the requisite basic functions needed for the disclosed methods, i.e., (i) possession of nucleic-acid programmable binding of the Cas protein to a target DNA, and (ii) ability to nick the target DNA sequence on one strand. The Cas proteins contemplated herein embrace CRISPR Cas 9 proteins, as well as Cas9 equivalents, variants (e.g., Cas9 nickase (nCas9) or nuclease inactive Cas9 (dCas9)) homologs, orthologs, or paralogs, whether naturally occurring or non-naturally occurring (e.g., engineered or recombinant), and may include a Cas9 equivalent from any type of CRISPR system (e.g., type II, V, VI), including Cpf1 (a type-V CRISPR-Cas systems), C2c1 (a type V CRISPR-Cas system), C2c2 (a type VI CRISPR-Cas system) and C2c3 (a type V CRISPR-Cas system). Further Cas-equivalents are described in Makarova et al., “C2c2 is a single-component programmable RNA-guided RNA-targeting CRISPR effector,” Science 2016; 353(6299), the contents of which are incorporated herein by reference.

[0284] The terms “Cas9” or “Cas9 nuclease” or “Cas9 moiety” or “Cas9 domain” embrace any naturally occurring Cas9 from any organism, any naturally-occurring Cas9 equivalent or functional fragment thereof, any Cas9 homolog, ortholog, or paralog from any organism, and any mutant or variant of a Cas9, naturally-occurring or engineered. The term Cas9 is not meant to be particularly limiting and may be referred to as a “Cas9 or equivalent.” Exemplary Cas9 proteins are further described herein and/or are described in the art and are incorporated herein by reference. The present disclosure is unlimited with regard to the particular Cas9 that is employed in the base editor (PE) of the invention.

[0285] As noted herein, Cas9 nuclease sequences and structures are well known to those of skill in the art (see, e.g., “Complete genome sequence of an M1 strain of Streptococcus pyogenes.” Ferretti et al., J. J., McShan W. M., Ajdic D. J., Savic D. J., Savic G., Lyon K., Primeaux C., Sezate S., Suvorov A. N., Kenton S., Lai H. S., Lin S. P., Qian Y., Jia H. G., Najar F. Z., Ren Q., Zhu H., Song L., White J., Yuan X., Clifton S. W., Roe B. A., McLaughlin R. E., Proc. Natl. Acad. Sci. U.S.A. 98:4658-4663(2001); “CRISPR RNA maturation by trans-encoded small RNA and host factor RNase III.” Deltcheva E., Chylinski K., Sharma C. M., Gonzales K., Chao Y., Pirzada Z. A., Eckert M. R., Vogel J., Charpentier E., Nature 471:602-607(2011); and “A programmable dual-RNA-guided DNA endonuclease in adaptive bacterial immunity.” Jinek M., Chylinski K., Fonfara I., Hauer M., Doudna J. A., Charpentier E. Science 337:816-821(2012), the entire contents of each of which are incorporated herein by reference).

[0286] Examples of Cas9 and Cas9 equivalents are provided as follows; however, these specific examples are not meant to be limiting. The base editor fusions of the present disclosure may use any suitable napDNAbp, including any suitable Cas9 or Cas9 equivalent.

### (1) Wild Type SpCas9

[0287] In one embodiment, the base editor constructs described herein may comprise the “canonical SpCas9” nuclease from S. pyogenes, which has been widely used as a tool for genome engineering. This Cas9 protein is a large, multi-domain protein containing two distinct nuclease domains. Point mutations can be introduced into Cas9 to abolish one or both nuclease activities, resulting in a nickase Cas9 (nCas9) or dead Cas9 (dCas9), respectively, that still retains its ability to bind DNA in a sgRNA-programmed manner. In principle, when fused to another protein or domain, Cas9 or variant thereof (e.g., nCas9) can target that protein to virtually any DNA sequence simply by co-expression with an appropriate sgRNA. As used herein, the canonical SpCas9 protein refers to the wild type protein from Streptococcus pyogenes having the following amino acid sequence:

| Description | Sequence | SEQ ID NO: |
|---|---|---|
| SpCas9 | MDKKYSIGLDIGTNSVGWAVITDEYKVPSKKFKVLGNTDRHSIKKNLIGALLFDS | 59 |
| Streptococcus | GETAEATRLKRTARRRYTRRKNRICYLQEIFSNEMAKVDDSFFHRLEESFLVEED | |
| pyogenes M1 | KKHERHPIFGNIVDEVAYHEKYPTIYHLRKKLVDSTDKADLRLIYLALAHMIKFR | |
| SwissProt | GHFLIEGDLNPDNSDVDKLFIQLVQTYNQLFEENPINASGVDAKAILSARLSKSRR | |
| Accession No. | LENLIAQLPGEKKNGLFGNLIALSLGLTPNFKSNFDLAEDAKLQLSKDTYDDDLD | |
| Q99ZW2 | NLLAQIGDQYADLFLAAKNLSDAILLSDILRVNTEITKAPLSASMIKRYDEHHQDL | |
| Wild type | TLLKALVRQQLPEKYKEIFFDQSKNGYAGYIDGGASQEEFYKFIKPILEKMDGTE | |
| | ELLVKLNREDLLRKQRTFDNGSIPHQIHLGELHAILRRQEDFYPFLKDNREKIEKIL | |
| | TFRIPYYVGPLARGNSRFAWMTRKSEETITPWNFEEVVDKGASAQSFIERMTNFD | |
| | KNLPNEKVLPKHSLLYEYFTVYNELTKVKYVTEGMRKPAFLSGEQKKAIVDLLF | |
| | KTNRKVTVKQLKEDYFKKIECFDSVEISGVEDRFNASLGTYHDLLKIIKDKDFLD | |
| | NEENEDILEDIVLTLTLFEDREMIEERLKTYAHLFDDKVMKQLKRRRYTGWGRL | |
| | SRKLINGIRDKQSGKTILDFLKSDGFANRNFMQLIHDDSLTFKEDIQKAQVSGQG | |
| | DSLHEHIANLAGSPAIKKGILQTVKVVDELVKVMGRHKPENIVIEMARENQTTQK | |
| | GQKNSRERMKRIEEGIKELGSQILKEHPVENTQLQNEKLYLYYLQNGRDMYVDQ | |
| | ELDINRLSDYDVDHIVPQSFLKDDSIDNKVLTRSDKNRGKSDNVPSEEVVKKMK | |
| | NYWRQLLNAKLITQRKFDNLTKAERGGLSELDKAGFIKRQLVETRQITKHVAQIL | |
| | DSRMNTKYDENDKLIREVKVITLKSKLVSDFRKDFQFYKVREINNYHHAHDAYL | |
| | NAVVGTALIKKYPKLESEFVYGDYKVYDVRKMIAKSEQEIGKATAKYFFYSNIM | |
| | NFFKTEITLANGEIRKRPLIETNGETGEIVWDKGRDFATVRKVLSMPQVNIVKKTE | |
| | VQTGGFSKESILPKRNSDKLIARKKDWDPKKYGGFDSPTVAYSVLVVAKVEKGK | |
| | SKKLKSVKELLGITIMERSSFEKNPIDFLEAKGYKEVKKDLIIKLPKYSLFELENGR | |
| | KRMLASAGELQKGNELALPSKYVNFLYLASHYEKLKGSPEDNEQKQLFVEQHK | |
| | HYLDEIIEQISEFSKRVILADANLDKVLSAYNKHRDKPIREQAENIIHLFTLTNLGA | |
| | PAAFKYFDTTIDRKRYTSTKEVLDATLIHQSITGLYETRIDLSQLGGD | |
| SpCas9 | ATGGATAAAAAATATAGCATTGGCCTGGATATTGGCACCAACAGCGTGGGCT | 60 |
| Reverse | GGGCGGTGATTACCGATGAATATAAAGTGCCGAGCAAAAAATTTAAAGTGCT | |
| translation of | GGGCAACACCGATCGCCATAGCATTAAAAAAAACCTGATTGGCGCGCTGCTG | |
| SwissProt | TTTGATAGCGGCGAAACCGCGGAAGCGACCCGCCTGAAACGCACCGCGCGCC | |
| Accession No. | GCCGCTATACCCGCCGCAAAAACCGCATTTGCTATCTGCAGGAAATTTTTAGC | |
| Q99ZW2 | AACGAAATGGCGAAAGTGGATGATAGCTTTTTTCATCGCCTGGAAGAAAGCT | |
| Streptococcus | TTCTGGTGGAAGAAGATAAAAAACATGAACGCCATCCGATTTTTGGCAACAT | |
| pyogenes | TGTGGATGAAGTGGCGTATCATGAAAAATATCCGACCATTTATCATCTGCGC | |
| | AAAAAACTGGTGGATAGCACCGATAAAGCGGATCTGCGCCTGATTTATCTGG | |
| | CGCTGGCGCATATGATTAAATTTCGCGGCCATTTTCTGATTGAAGGCGATCTG | |
| | AACCCGGATAACAGCGATGTGGATAAACTGTTTATTCAGCTGGTGCAGACCT | |
| | ATAACCAGCTGTTTGAAGAAAACCCGATTAACGCGAGCGGCGTGGATGCGAA | |
| | AGCGATTCTGAGCGCGCGCCTGAGCAAAAGCCGCCGCCTGGAAAACCTGATT | |
| | GCGCAGCTGCCGGGCGAAAAAAAAAACGGCCTGTTTGGCAACCTGATTGCGC | |
| | TGAGCCTGGGCCTGACCCCGAACTTTAAAAGCAACTTTGATCTGGCGGAAGA | |
| | TGCGAAACTGCAGCTGAGCAAAGATACCTATGATGATGATCTGGATAACCTG | |
| | CTGGCGCAGATTGGCGATCAGTATGCGGATCTGTTTCTGGCGGCGAAAAACC | |
| | TGAGCGATGCGATTCTGCTGAGCGATATTCTGCGCGTGAACACCGAAATTAC | |
| | CAAAGCGCCGCTGAGCGCGAGCATGATTAAACGCTATGATGAACATCATCAG | |
| | GATCTGACCCTGCTGAAAGCGCTGGTGCGCCAGCAGCTGCCGGAAAAATATA | |
| | AAGAAATTTTTTTTGATCAGAGCAAAAACGGCTATGCGGGCTATATTGATGG | |
| | CGGCGCGAGCCAGGAAGAATTTTATAAATTTATTAAACCGATTCTGGAAAAA | |
| | ATGGATGGCACCGAAGAACTGCTGGTGAAACTGAACCGCGAAGATCTGCTGC | |
| | GCAAACAGCGCACCTTTGATAACGGCAGCATTCCGCATCAGATTCATCTGGG | |
| | CGAACTGCATGCGATTCTGCGCCGCCAGGAAGATTTTTATCCGTTTCTGAAAG | |
| | ATAACCGCGAAAAAATTGAAAAAATTCTGACCTTTCGCATTCCGTATTATGTG | |
| | GGCCCGCTGGCGCGCGGCAACAGCCGCTTTGCGTGGATGACCCGCAAAAGCG | |
| | AAGAAACCATTACCCCGTGGAACTTTGAAGAAGTGGTGGATAAAGGCGCGA | |
| | GCGCGCAGAGCTTTATTGAACGCATGACCAACTTTGATAAAAACCTGCCGAA | |
| | CGAAAAAGTGCTGCCGAAACATAGCCTGCTGTATGAATATTTTACCGTGTAT | |
| | AACGAACTGACCAAAGTGAAATATGTGACCGAAGGCATGCGCAAACCGGCG | |
| | TTTCTGAGCGGCGAACAGAAAAAAGCGATTGTGGATCTGCTGTTTAAAACCA | |
| | ACCGCAAAGTGACCGTGAAACAGCTGAAAGAAGATTATTTTAAAAAAATTGA | |
| | ATGCTTTGATAGCGTGGAAATTAGCGGCGTGGAAGATCGCTTTAACGCGAGC | |
| | CTGGGCACCTATCATGATCTGCTGAAAATTATTAAAGATAAAGATTTTCTGGA | |
| | TAACGAAGAAAACGAAGATATTCTGGAAGATATTGTGCTGACCCTGACCCTG | |
| | TTTGAAGATCGCGAAATGATTGAAGAACGCCTGAAAACCTATGCGCATCTGT | |
| | TTGATGATAAAGTGATGAAACAGCTGAAACGCCGCCGCTATACCGGCTGGGG | |
| | CCGCCTGAGCCGCAAACTGATTAACGGCATTCGCGATAAACAGAGCGGCAAA | |
| | ACCATTCTGGATTTTCTGAAAAGCGATGGCTTTGCGAACCGCAACTTTATGCA | |
| | GCTGATTCATGATGATAGCCTGACCTTTAAAGAAGATATTCAGAAAGCGCAG | |
| | GTGAGCGGCCAGGGCGATAGCCTGCATGAACATATTGCGAACCTGGCGGGCA | |
| | GCCCGGCGATTAAAAAAGGCATTCTGCAGACCGTGAAAGTGGTGGATGAACT | |
| | GGTGAAAGTGATGGGCCGCCATAAACCGGAAAACATTGTGATTGAAATGGCG | |
| | CGCGAAAACCAGACCACCCAGAAAGGCCAGAAAAACAGCCGCGAACGCATG | |
| | AAACGCATTGAAGAAGGCATTAAAGAACTGGGCAGCCAGATTCTGAAAGAA | |
| | CATCCGGTGGAAAACACCCAGCTGCAGAACGAAAAACTGTATCTGTATTATC | |
| | TGCAGAACGGCCGCGATATGTATGTGGATCAGGAACTGGATATTAACCGCCT | |
| | GAGCGATTATGATGTGGATCATATTGTGCCGCAGAGCTTTCTGAAAGATGAT | |
| | AGCATTGATAACAAAGTGCTGACCCGCAGCGATAAAAACCGCGGCAAAAGC | |
| | GATAACGTGCCGAGCGAAGAAGTGGTGAAAAAAATGAAAAACTATTGGCGC | |
| | CAGCTGCTGAACGCGAAACTGATTACCCAGCGCAAATTTGATAACCTGACCA | |
| | AAGCGGAACGCGGCGGCCTGAGCGAACTGGATAAAGCGGGCTTTATTAAAC | |
| | GCCAGCTGGTGGAAACCCGCCAGATTACCAAACATGTGGCGCAGATTCTGGA | |
| | TAGCCGCATGAACACCAAATATGATGAAAACGATAAACTGATTCGCGAAGTG | |
| | AAAGTGATTACCCTGAAAAGCAAACTGGTGAGCGATTTTCGCAAAGATTTTC | |
| | AGTTTTATAAAGTGCGCGAAATTAACAACTATCATCATGCGCATGATGCGTAT | |
| | CTGAACGCGGTGGTGGGCACCGCGCTGATTAAAAAATATCCGAAACTGGAAA | |
| | GCGAATTTGTGTATGGCGATTATAAAGTGTATGATGTGCGCAAAATGATTGC | |
| | GAAAAGCGAACAGGAAATTGGCAAAGCGACCGCGAAATATTTTTTTTATAGC | |
| | AACATTATGAACTTTTTTAAAACCGAAATTACCCTGGCGAACGGCGAAATTC | |
| | GCAAACGCCCGCTGATTGAAACCAACGGCGAAACCGGCGAAATTGTGTGGG | |
| | ATAAAGGCCGCGATTTTGCGACCGTGCGCAAAGTGCTGAGCATGCCGCAGGT | |
| | GAACATTGTGAAAAAAACCGAAGTGCAGACCGGCGGCTTTAGCAAAGAAAG | |
| | CATTCTGCCGAAACGCAACAGCGATAAACTGATTGCGCGCAAAAAAGATTGG | |
| | GATCCGAAAAAATATGGCGGCTTTGATAGCCCGACCGTGGCGTATAGCGTGC | |
| | TGGTGGTGGCGAAAGTGGAAAAAGGCAAAAGCAAAAAACTGAAAAGCGTGA | |
| | AAGAACTGCTGGGCATTACCATTATGGAACGCAGCAGCTTTGAAAAAAACCC | |
| | GATTGATTTTCTGGAAGCGAAAGGCTATAAAGAAGTGAAAAAAGATCTGATT | |
| | ATTAAACTGCCGAAATATAGCCTGTTTGAACTGGAAAACGGCCGCAAACGCA | |
| | TGCTGGCGAGCGCGGGCGAACTGCAGAAAGGCAACGAACTGGCGCTGCCGA | |
| | GCAAATATGTGAACTTTCTGTATCTGGCGAGCCATTATGAAAAACTGAAAGG | |
| | CAGCCCGGAAGATAACGAACAGAAACAGCTGTTTGTGGAACAGCATAAACA | |
| | TTATCTGGATGAAATTATTGAACAGATTAGCGAATTTAGCAAACGCGTGATTC | |
| | TGGCGGATGCGAACCTGGATAAAGTGCTGAGCGCGTATAACAAACATCGCGA | |
| | TAAACCGATTCGCGAACAGGCGGAAAACATTATTCATCTGTTTACCCTGACC | |
| | AACCTGGGCGCGCCGGCGGCGTTTAAATATTTTGATACCACCATTGATCGCA | |
| | AACGCTATACCAGCACCAAAGAAGTGCTGGATGCGACCCTGATTCATCAGAG | |
| | CATTACCGGCCTGTATGAAACCCGCATTGATCTGAGCCAGCTGGGCGGCGAT | |

[0288] The base editors described herein may include canonical SpCas9, or any variant thereof having at least 80%, at least 85%, at least 90%, at least 95%, or at least 99% sequence identity with a wild type Cas9 sequence provided above. These variants may include SpCas9 variants containing one or more mutations, including any known mutation reported with the SwissProt Accession No. Q99ZW2 entry, which include:

| SpCas9 mutation (relative | Function/Characteristic |
|---|---|
| to the amino acid sequence | (as reported) (see UniProtKB- |
| of the canonical SpCas9 | Q99ZW2 (CAS9_STRPT1) entry- |
| sequence, SEQ ID NO: 59) | incorporated herein by reference) |
| D10A | Nickase mutant which cleaves the |
| | protospacer strand (but no cleavage |
| | of non-protospacer strand) |
| S15A | Decreased DNA cleavage activity |
| R66A | Decreased DNA cleavage activity |
| R70A | No DNA cleavage |
| R74A | Decreased DNA cleavage |
| R78A | Decreased DNA cleavage |
| 97-150 deletion | No nuclease activity |
| R165A | Decreased DNA cleavage |
| 175-307 deletion | About 50% decreased DNA cleavage |
| 312-409 deletion | No nuclease activity |
| E762A | Nickase |
| H840A | Nickase mutant which cleaves the non- |
| | protospacer strand but does not cleave |
| | the protospacer strand |
| N854A | Nickase |
| N863A | Nickase |
| H982A | Decreased DNA cleavage |
| D986A | Nickase |
| 1099-1368 deletion | No nuclease activity |
| R1333A | Reduced DNA binding |

[0289] Other wild type SpCas9 sequences that may be used in the present disclosure, include:

| Description | Sequence | SEQ ID NO: |
|---|---|---|
| SpCas9 | ATGGATAAGAAATACTCAATAGGCTTAGATATCGGCACAAATAGCGTCGG | 61 |
| Streptococcus | ATGGGCGGTGATCACTGATGATTATAAGGTTCCGTCTAAAAAGTTCAAGGT | |
| pyogenes | TCTGGGAAATACAGACCGCCACAGTATCAAAAAAAATCTTATAGGGGCTCT | |
| MGAS1882 | TTTATTTGGCAGTGGAGAGACAGCGGAAGCGACTCGTCTCAAACGGACAGC | |
| wild type | TCGTAGAAGGTATACACGTCGGAAGAATCGTATTTGTTATCTACAGGAGAT | |
| NC_017053.1 | TTTTTCAAATGAGATGGCGAAAGTAGATGATAGTTTCTTTCATCGACTTGAA | |
| | GAGTCTTTTTTGGTGGAAGAAGACAAGAAGCATGAACGTCATCCTATTTTT | |
| | GGAAATATAGTAGATGAAGTTGCTTATCATGAGAAATATCCAACTATCTAT | |
| | CATCTGCGAAAAAAATTGGCAGATTCTACTGATAAAGCGGATTTGCGCTTA | |
| | ATCTATTTGGCCTTAGCGCATATGATTAAGTTTCGTGGTCATTTTTTGATTG | |
| | AGGGAGATTTAAATCCTGATAATAGTGATGTGGACAAACTATTTATCCAGT | |
| | TGGTACAAATCTACAATCAATTATTTGAAGAAAACCCTATTAACGCAAGTA | |
| | GAGTAGATGCTAAAGCGATTCTTTCTGCACGATTGAGTAAATCAAGACGAT | |
| | TAGAAAATCTCATTGCTCAGCTCCCCGGTGAGAAGAGAAATGGCTTGTTTG | |
| | GGAATCTCATTGCTTTGTCATTGGGATTGACCCCTAATTTTAAATCAAATTT | |
| | TGATTTGGCAGAAGATGCTAAATTACAGCTTTCAAAAGATACTTACGATGA | |
| | TGATTTAGATAATTTATTGGCGCAAATTGGAGATCAATATGCTGATTTGTTT | |
| | TTGGCAGCTAAGAATTTATCAGATGCTATTTTACTTTCAGATATCCTAAGAG | |
| | TAAATAGTGAAATAACTAAGGCTCCCCTATCAGCTTCAATGATTAAGCGCT | |
| | ACGATGAACATCATCAAGACTTGACTCTTTTAAAAGCTTTAGTTCGACAAC | |
| | AACTTCCAGAAAAGTATAAAGAAATCTTTTTTGATCAATCAAAAAACGGAT | |
| | ATGCAGGTTATATTGATGGGGGAGCTAGCCAAGAAGAATTTTATAAATTTA | |
| | TCAAACCAATTTTAGAAAAAATGGATGGTACTGAGGAATTATTGGTGAAAC | |
| | TAAATCGTGAAGATTTGCTGCGCAAGCAACGGACCTTTGACAACGGCTCTA | |
| | TTCCCCATCAAATTCACTTGGGTGAGCTGCATGCTATTTTGAGAAGACAAG | |
| | AAGACTTTTATCCATTTTTAAAAGACAATCGTGAGAAGATTGAAAAAATCT | |
| | TGACTTTTCGAATTCCTTATTATGTTGGTCCATTGGCGCGTGGCAATAGTCG | |
| | TTTTGCATGGATGACTCGGAAGTCTGAAGAAACAATTACCCCATGGAATTT | |
| | TGAAGAAGTTGTCGATAAAGGTGCTTCAGCTCAATCATTTATTGAACGCAT | |
| | GACAAACTTTGATAAAAATCTTCCAAATGAAAAAGTACTACCAAAACATAG | |
| | TTTGCTTTATGAGTATTTTACGGTTTATAACGAATTGACAAAGGTCAAATAT | |
| | GTTACTGAGGGAATGCGAAAACCAGCATTTCTTTCAGGTGAACAGAAGAA | |
| | AGCCATTGTTGATTTACTCTTCAAAACAAATCGAAAAGTAACCGTTAAGCA | |
| | ATTAAAAGAAGATTATTTCAAAAAAATAGAATGTTTTGATAGTGTTGAAAT | |
| | TTCAGGAGTTGAAGATAGATTTAATGCTTCATTAGGCGCCTACCATGATTTG | |
| | CTAAAAATTATTAAAGATAAAGATTTTTTGGATAATGAAGAAAATGAAGAT | |
| | ATCTTAGAGGATATTGTTTTAACATTGACCTTATTTGAAGATAGGGGGATG | |
| | ATTGAGGAAAGACTTAAAACATATGCTCACCTCTTTGATGATAAGGTGATG | |
| | AAACAGCTTAAACGTCGCCGTTATACTGGTTGGGGACGTTTGTCTCGAAAA | |
| | TTGATTAATGGTATTAGGGATAAGCAATCTGGCAAAACAATATTAGATTTT | |
| | TTGAAATCAGATGGTTTTGCCAATCGCAATTTTATGCAGCTGATCCATGATG | |
| | ATAGTTTGACATTTAAAGAAGATATTCAAAAAGCACAGGTGTCTGGACAAG | |
| | GCCATAGTTTACATGAACAGATTGCTAACTTAGCTGGCAGTCCTGCTATTA | |
| | AAAAAGGTATTTTACAGACTGTAAAAATTGTTGATGAACTGGTCAAAGTAA | |
| | TGGGGCATAAGCCAGAAAATATCGTTATTGAAATGGCACGTGAAAATCAG | |
| | ACAACTCAAAAGGGCCAGAAAAATTCGCGAGAGCGTATGAAACGAATCGA | |
| | AGAAGGTATCAAAGAATTAGGAAGTCAGATTCTTAAAGAGCATCCTGTTGA | |
| | AAATACTCAATTGCAAAATGAAAAGCTCTATCTCTATTATCTACAAAATGG | |
| | AAGAGACATGTATGTGGACCAAGAATTAGATATTAATCGTTTAAGTGATTA | |
| | TGATGTCGATCACATTGTTCCACAAAGTTTCATTAAAGACGATTCAATAGA | |
| | CAATAAGGTACTAACGCGTTCTGATAAAAATCGTGGTAAATCGGATAACGT | |
| | TCCAAGTGAAGAAGTAGTCAAAAAGATGAAAAACTATTGGAGACAACTTC | |
| | TAAACGCCAAGTTAATCACTCAACGTAAGTTTGATAATTTAACGAAAGCTG | |
| | AACGTGGAGGTTTGAGTGAACTTGATAAAGCTGGTTTTATCAAACGCCAAT | |
| | TGGTTGAAACTCGCCAAATCACTAAGCATGTGGCACAAATTTTGGATAGTC | |
| | GCATGAATACTAAATACGATGAAAATGATAAACTTATTCGAGAGGTTAAAG | |
| | TGATTACCTTAAAATCTAAATTAGTTTCTGACTTCCGAAAAGATTTCCAATT | |
| | CTATAAAGTACGTGAGATTAACAATTACCATCATGCCCATGATGCGTATCT | |
| | AAATGCCGTCGTTGGAACTGCTTTGATTAAGAAATATCCAAAACTTGAATC | |
| | GGAGTTTGTCTATGGTGATTATAAAGTTTATGATGTTCGTAAAATGATTGCT | |
| | AAGTCTGAGCAAGAAATAGGCAAAGCAACCGCAAAATATTTCTTTTACTCT | |
| | AATATCATGAACTTCTTCAAAACAGAAATTACACTTGCAAATGGAGAGATT | |
| | CGCAAACGCCCTCTAATCGAAACTAATGGGGAAACTGGAGAAATTGTCTGG | |
| | GATAAAGGGCGAGATTTTGCCACAGTGCGCAAAGTATTGTCCATGCCCCAA | |
| | GTCAATATTGTCAAGAAAACAGAAGTACAGACAGGCGGATTCTCCAAGGA | |
| | GTCAATTTTACCAAAAAGAAATTCGGACAAGCTTATTGCTCGTAAAAAAGA | |
| | CTGGGATCCAAAAAAATATGGTGGTTTTGATAGTCCAACGGTAGCTTATTC | |
| | AGTCCTAGTGGTTGCTAAGGTGGAAAAAGGGAAATCGAAGAAGTTAAAAT | |
| | CCGTTAAAGAGTTACTAGGGATCACAATTATGGAAAGAAGTTCCTTTGAAA | |
| | AAAATCCGATTGACTTTTTAGAAGCTAAAGGATATAAGGAAGTTAAAAAA | |
| | GACTTAATCATTAAACTACCTAAATATAGTCTTTTTGAGTTAGAAAACGGTC | |
| | GTAAACGGATGCTGGCTAGTGCCGGAGAATTACAAAAAGGAAATGAGCTG | |
| | GCTCTGCCAAGCAAATATGTGAATTTTTTATATTTAGCTAGTCATTATGAAA | |
| | AGTTGAAGGGTAGTCCAGAAGATAACGAACAAAAACAATTGTTTGTGGAG | |
| | CAGCATAAGCATTATTTAGATGAGATTATTGAGCAAATCAGTGAATTTTCT | |
| | AAGCGTGTTATTTTAGCAGATGCCAATTTAGATAAAGTTCTTAGTGCATATA | |
| | ACAAACATAGAGACAAACCAATACGTGAACAAGCAGAAAATATTATTCAT | |
| | TTATTTACGTTGACGAATCTTGGAGCTCCCGCTGCTTTTAAATATTTTGATA | |
| | CAACAATTGATCGTAAACGATATACGTCTACAAAAGAAGTTTTAGATGCCA | |
| | CTCTTATCCATCAATCCATCACTGGTCTTTATGAAACACGCATTGATTTGAG | |
| | TCAGCTAGGAGGTGACTGA | |
| SpCas9 | MDKKYSIGLDIGTNSVGWAVITDDYKVPSKKFKVLGNTDRHSIKKNLIGALLF | 62 |
| Streptococcus | GSGETAEATRLKRTARRRYTRRKNRICYLQEIFSNEMAKVDDSFFHRLEESFLV | |
| pyogenes | EEDKKHERHPIFGNIVDEVAYHEKYPTIYHLRKKLADSTDKADLRLIYLALAH | |
| MGAS1882 | MIKFRGHFLIEGDLNPDNSDVDKLFIQLVQIYNQLFEENPINASRVDAKAILSAR | |
| wild type | LSKSRRLENLIAQLPGEKRNGLFGNLIALSLGLTPNFKSNFDLAEDAKLQLSKD | |
| NC_017053.1 | TYDDDLDNLLAQIGDQYADLFLAAKNLSDAILLSDILRVNSEITKAPLSASMIK | |
| | RYDEHHQDLTLLKALVRQQLPEKYKEIFFDQSKNGYAGYIDGGASQEEFYKFI | |
| | KPILEKMDGTEELLVKLNREDLLRKQRTFDNGSIPHQIHLGELHAILRRQEDFY | |
| | PFLKDNREKIEKILTFRIPYYVGPLARGNSRFAWMTRKSEETITPWNFEEVVDK | |
| | GASAQSFIERMTNFDKNLPNEKVLPKHSLLYEYFTVYNELTKVKYVTEGMRKP | |
| | AFLSGEQKKAIVDLLFKTNRKVTVKQLKEDYFKKIECFDSVEISGVEDRFNASL | |
| | GAYHDLLKIIKDKDFLDNEENEDILEDIVLTLTLFEDRGMIEERLKTYAHLFDD | |
| | KVMKQLKRRRYTGWGRLSRKLINGIRDKQSGKTILDFLKSDGFANRNFMQLIH | |
| | DDSLTFKEDIQKAQVSGQGHSLHEQIANLAGSPAIKKGILQTVKIVDELVKVMG | |
| | HKPENIVIEMARENQTTQKGQKNSRERMKRIEEGIKELGSQILKEHPVENTQLQ | |
| | NEKLYLYYLQNGRDMYVDQELDINRLSDYDVDHIVPQSFIKDDSIDNKVLTRS | |
| | DKNRGKSDNVPSEEVVKKMKNYWRQLLNAKLITQRKFDNLTKAERGGLSEL | |
| | DKAGFIKRQLVETRQITKHVAQILDSRMNTKYDENDKLIREVKVITLKSKLVSD | |
| | FRKDFQFYKVREINNYHHAHDAYLNAVVGTALIKKYPKLESEFVYGDYKVYD | |
| | VRKMIAKSEQEIGKATAKYFFYSNIMNFFKTEITLANGEIRKRPLIETNGETGEI | |
| | VWDKGRDFATVRKVLSMPQVNIVKKTEVQTGGFSKESILPKRNSDKLIARKKD | |
| | WDPKKYGGFDSPTVAYSVLVVAKVEKGKSKKLKSVKELLGITIMERSSFEKNP | |
| | IDFLEAKGYKEVKKDLIIKLPKYSLFELENGRKRMLASAGELQKGNELALPSKY | |
| | VNFLYLASHYEKLKGSPEDNEQKQLFVEQHKHYLDEIIEQISEFSKRVILADAN | |
| | LDKVLSAYNKHRDKPIREQAENIIHLFTLTNLGAPAAFKYFDTTIDRKRYTSTK | |
| | EVLDATLIHQSITGLYETRIDLSQLGGD | |
| SpCas9 | ATGGATAAAAAGTATTCTATTGGTTTAGACATCGGCACTAATTCCGTTGGA | 63 |
| Streptococcus | TGGGCTGTCATAACCGATGAATACAAAGTACCTTCAAAGAAATTTAAGGTG | |
| pyogenes | TTGGGGAACACAGACCGTCATTCGATTAAAAAGAATCTTATCGGTGCCCTC | |
| wild type | CTATTCGATAGTGGCGAAACGGCAGAGGCGACTCGCCTGAAACGAACCGC | |
| SWBC2D7W | TCGGAGAAGGTATACACGTCGCAAGAACCGAATATGTTACTTACAAGAAAT | |
| 014 | TTTTAGCAATGAGATGGCCAAAGTTGACGATTCTTTCTTTCACCGTTTGGAA | |
| | GAGTCCTTCCTTGTCGAAGAGGACAAGAAACATGAACGGCACCCCATCTTT | |
| | GGAAACATAGTAGATGAGGTGGCATATCATGAAAAGTACCCAACGATTTAT | |
| | CACCTCAGAAAAAAGCTAGTTGACTCAACTGATAAAGCGGACCTGAGGTTA | |
| | ATCTACTTGGCTCTTGCCCATATGATAAAGTTCCGTGGGCACTTTCTCATTG | |
| | AGGGTGATCTAAATCCGGACAACTCGGATGTCGACAAACTGTTCATCCAGT | |
| | TAGTACAAACCTATAATCAGTTGTTTGAAGAGAACCCTATAAATGCAAGTG | |
| | GCGTGGATGCGAAGGCTATTCTTAGCGCCCGCCTCTCTAAATCCCGACGGC | |
| | TAGAAAACCTGATCGCACAATTACCCGGAGAGAAGAAAAATGGGTTGTTC | |
| | GGTAACCTTATAGCGCTCTCACTAGGCCTGACACCAAATTTTAAGTCGAAC | |
| | TTCGACTTAGCTGAAGATGCCAAATTGCAGCTTAGTAAGGACACGTACGAT | |
| | GACGATCTCGACAATCTACTGGCACAAATTGGAGATCAGTATGCGGACTTA | |
| | TTTTTGGCTGCCAAAAACCTTAGCGATGCAATCCTCCTATCTGACATACTGA | |
| | GAGTTAATACTGAGATTACCAAGGCGCCGTTATCCGCTTCAATGATCAAAA | |
| | GGTACGATGAACATCACCAAGACTTGACACTTCTCAAGGCCCTAGTCCGTC | |
| | AGCAACTGCCTGAGAAATATAAGGAAATATTCTTTGATCAGTCGAAAAACG | |
| | GGTACGCAGGTTATATTGACGGCGGAGCGAGTCAAGAGGAATTCTACAAG | |
| | TTTATCAAACCCATATTAGAGAAGATGGATGGGACGGAAGAGTTGCTTGTA | |
| | AAACTCAATCGCGAAGATCTACTGCGAAAGCAGCGGACTTTCGACAACGGT | |
| | AGCATTCCACATCAAATCCACTTAGGCGAATTGCATGCTATACTTAGAAGG | |
| | CAGGAGGATTTTTATCCGTTCCTCAAAGACAATCGTGAAAAGATTGAGAAA | |
| | ATCCTAACCTTTCGCATACCTTACTATGTGGGACCCCTGGCCCGAGGGAAC | |
| | TCTCGGTTCGCATGGATGACAAGAAAGTCCGAAGAAACGATTACTCCATGG | |
| | AATTTTGAGGAAGTTGTCGATAAAGGTGCGTCAGCTCAATCGTTCATCGAG | |
| | AGGATGACCAACTTTGACAAGAATTTACCGAACGAAAAAGTATTGCCTAAG | |
| | CACAGTTTACTTTACGAGTATTTCACAGTGTACAATGAACTCACGAAAGTT | |
| | AAGTATGTCACTGAGGGCATGCGTAAACCCGCCTTTCTAAGCGGAGAACAG | |
| | AAGAAAGCAATAGTAGATCTGTTATTCAAGACCAACCGCAAAGTGACAGTT | |
| | AAGCAATTGAAAGAGGACTACTTTAAGAAAATTGAATGCTTCGATTCTGTC | |
| | GAGATCTCCGGGGTAGAAGATCGATTTAATGCGTCACTTGGTACGTATCAT | |
| | GACCTCCTAAAGATAATTAAAGATAAGGACTTCCTGGATAACGAAGAGAA | |
| | TGAAGATATCTTAGAAGATATAGTGTTGACTCTTACCCTCTTTGAAGATCGG | |
| | GAAATGATTGAGGAAAGACTAAAAACATACGCTCACCTGTTCGACGATAA | |
| | GGTTATGAAACAGTTAAAGAGGCGTCGCTATACGGGCTGGGGACGATTGTC | |
| | GCGGAAACTTATCAACGGGATAAGAGACAAGCAAAGTGGTAAAACTATTC | |
| | TCGATTTTCTAAAGAGCGACGGCTTCGCCAATAGGAACTTTATGCAGCTGA | |
| | TCCATGATGACTCTTTAACCTTCAAAGAGGATATACAAAAGGCACAGGTTT | |
| | CCGGACAAGGGGACTCATTGCACGAACATATTGCGAATCTTGCTGGTTCGC | |
| | CAGCCATCAAAAAGGGCATACTCCAGACAGTCAAAGTAGTGGATGAGCTA | |
| | GTTAAGGTCATGGGACGTCACAAACCGGAAAACATTGTAATCGAGATGGC | |
| | ACGCGAAAATCAAACGACTCAGAAGGGGCAAAAAAACAGTCGAGAGCGG | |
| | ATGAAGAGAATAGAAGAGGGTATTAAAGAACTGGGCAGCCAGATCTTAAA | |
| | GGAGCATCCTGTGGAAAATACCCAATTGCAGAACGAGAAACTTTACCTCTA | |
| | TTACCTACAAAATGGAAGGGACATGTATGTTGATCAGGAACTGGACATAAA | |
| | CCGTTTATCTGATTACGACGTCGATCACATTGTACCCCAATCCTTTTTGAAG | |
| | GACGATTCAATCGACAATAAAGTGCTTACACGCTCGGATAAGAACCGAGG | |
| | GAAAAGTGACAATGTTCCAAGCGAGGAAGTCGTAAAGAAAATGAAGAACT | |
| | ATTGGCGGCAGCTCCTAAATGCGAAACTGATAACGCAAAGAAAGTTCGAT | |
| | AACTTAACTAAAGCTGAGAGGGGTGGCTTGTCTGAACTTGACAAGGCCGGA | |
| | TTTATTAAACGTCAGCTCGTGGAAACCCGCCAAATCACAAAGCATGTTGCA | |
| | CAGATACTAGATTCCCGAATGAATACGAAATACGACGAGAACGATAAGCT | |
| | GATTCGGGAAGTCAAAGTAATCACTTTAAAGTCAAAATTGGTGTCGGACTT | |
| | CAGAAAGGATTTTCAATTCTATAAAGTTAGGGAGATAAATAACTACCACCA | |
| | TGCGCACGACGCTTATCTTAATGCCGTCGTAGGGACCGCACTCATTAAGAA | |
| | ATACCCGAAGCTAGAAAGTGAGTTTGTGTATGGTGATTACAAAGTTTATGA | |
| | CGTCCGTAAGATGATCGCGAAAAGCGAACAGGAGATAGGCAAGGCTACAG | |
| | CCAAATACTTCTTTTATTCTAACATTATGAATTTCTTTAAGACGGAAATCAC | |
| | TCTGGCAAACGGAGAGATACGCAAACGACCTTTAATTGAAACCAATGGGG | |
| | AGACAGGTGAAATCGTATGGGATAAGGGCCGGGACTTCGCGACGGTGAGA | |
| | AAAGTTTTGTCCATGCCCCAAGTCAACATAGTAAAGAAAACTGAGGTGCAG | |
| | ACCGGAGGGTTTTCAAAGGAATCGATTCTTCCAAAAAGGAATAGTGATAAG | |
| | CTCATCGCTCGTAAAAAGGACTGGGACCCGAAAAAGTACGGTGGCTTCGAT | |
| | AGCCCTACAGTTGCCTATTCTGTCCTAGTAGTGGCAAAAGTTGAGAAGGGA | |
| | AAATCCAAGAAACTGAAGTCAGTCAAAGAATTATTGGGGATAACGATTAT | |
| | GGAGCGCTCGTCTTTTGAAAAGAACCCCATCGACTTCCTTGAGGCGAAAGG | |
| | TTACAAGGAAGTAAAAAAGGATCTCATAATTAAACTACCAAAGTATAGTCT | |
| | GTTTGAGTTAGAAAATGGCCGAAAACGGATGTTGGCTAGCGCCGGAGAGC | |
| | TTCAAAAGGGGAACGAACTCGCACTACCGTCTAAATACGTGAATTTCCTGT | |
| | ATTTAGCGTCCCATTACGAGAAGTTGAAAGGTTCACCTGAAGATAACGAAC | |
| | AGAAGCAACTTTTTGTTGAGCAGCACAAACATTATCTCGACGAAATCATAG | |
| | AGCAAATTTCGGAATTCAGTAAGAGAGTCATCCTAGCTGATGCCAATCTGG | |
| | ACAAAGTATTAAGCGCATACAACAAGCACAGGGATAAACCCATACGTGAG | |
| | CAGGCGGAAAATATTATCCATTTGTTTACTCTTACCAACCTCGGCGCTCCAG | |
| | CCGCATTCAAGTATTTTGACACAACGATAGATCGCAAACGATACACTTCTA | |
| | CCAAGGAGGTGCTAGACGCGACACTGATTCACCAATCCATCACGGGATTAT | |
| | ATGAAACTCGGATAGATTTGTCACAGCTTGGGGGTGACGGATCCCCCAAGA | |
| | AGAAGAGGAAAGTCTCGAGCGACTACAAAGACCATGACGGTGATTATAAA | |
| | GATCATGACATCGATTACAAGGATGACGATGACAAGGCTGCAGGA | |
| SpCas9 | MDKKYSIGLDIGTNSVGWAVITDEYKVPSKKFKVLGNTDRHSIKKNLIGALLF | 64 |
| Streptococcus | DSGETAEATRLKRTARRRYTRRKNRICYLQEIFSNEMAKVDDSFFHRLEESFLV | |
| pyogenes | EEDKKHERHPIFGNIVDEVAYHEKYPTIYHLRKKLVDSTDKADLRLIYLALAH | |
| wild type | MIKFRGHFLIEGDLNPDNSDVDKLFIQLVQTYNQLFEENPINASGVDAKAILSA | |
| Encoded | RLSKSRRLENLIAQLPGEKKNGLFGNLIALSLGLTPNFKSNFDLAEDAKLQLSK | |
| product of | DTYDDDLDNLLAQIGDQYADLFLAAKNLSDAILLSDILRVNTEITKAPLSASMI | |
| SWBC2D7W014 | KRYDEHHQDLTLLKALVRQQLPEKYKEIFFDQSKNGYAGYIDGGASQEEFYKF | |
| | IKPILEKMDGTEELLVKLNREDLLRKQRTFDNGSIPHQIHLGELHAILRRQEDFY | |
| | PFLKDNREKIEKILTFRIPYYVGPLARGNSRFAWMTRKSEETITPWNFEEVVDK | |
| | GASAQSFIERMTNFDKNLPNEKVLPKHSLLYEYFTVYNELTKVKYVTEGMRKP | |
| | AFLSGEQKKAIVDLLFKTNRKVTVKQLKEDYFKKIECFDSVEISGVEDRFNASL | |
| | GTYHDLLKIIKDKDFLDNEENEDILEDIVLTLTLFEDREMIEERLKTYAHLFDDK | |
| | VMKQLKRRRYTGWGRLSRKLINGIRDKQSGKTILDFLKSDGFANRNFMQLIHD | |
| | DSLTFKEDIQKAQVSGQGDSLHEHIANLAGSPAIKKGILQTVKVVDELVKVMG | |
| | RHKPENIVIEMARENQTTQKGQKNSRERMKRIEEGIKELGSQILKEHPVENTQL | |
| | QNEKLYLYYLQNGRDMYVDQELDINRLSDYDVDHIVPQSFLKDDSIDNKVLT | |
| | RSDKNRGKSDNVPSEEVVKKMKNYWRQLLNAKLITQRKFDNLTKAERGGLSE | |
| | LDKAGFIKRQLVETRQITKHVAQILDSRMNTKYDENDKLIREVKVITLKSKLVS | |
| | DFRKDFQFYKVREINNYHHAHDAYLNAVVGTALIKKYPKLESEFVYGDYKVY | |
| | DVRKMIAKSEQEIGKATAKYFFYSNIMNFFKTEITLANGEIRKRPLIETNGETGE | |
| | IVWDKGRDFATVRKVLSMPQVNIVKKTEVQTGGFSKESILPKRNSDKLIARKK | |
| | DWDPKKYGGFDSPTVAYSVLVVAKVEKGKSKKLKSVKELLGITIMERSSFEKN | |
| | PIDFLEAKGYKEVKKDLIIKLPKYSLFELENGRKRMLASAGELQKGNELALPSK | |
| | YVNFLYLASHYEKLKGSPEDNEQKQLFVEQHKHYLDEIIEQISEFSKRVILADA | |
| | NLDKVLSAYNKHRDKPIREQAENIIHLFTLTNLGAPAAFKYFDTTIDRKRYTST | |
| | KEVLDATLIHQSITGLYETRIDLSQLGGDGSPKKKRKVSSDYKDHDGDYKDHD | |
| | IDYKDDDDKAAG | |
| SpCas9 | ATGGATAAGAAATACTCAATAGGCTTAGATATCGGCACAAATAGCGTCGG | 65 |
| Streptococcus | ATGGGCGGTGATCACTGATGAATATAAGGTTCCGTCTAAAAAGTTCAAGGT | |
| pyogenes | TCTGGGAAATACAGACCGCCACAGTATCAAAAAAAATCTTATAGGGGCTCT | |
| M1GAS wild | TTTATTTGACAGTGGAGAGACAGCGGAAGCGACTCGTCTCAAACGGACAGC | |
| type | TCGTAGAAGGTATACACGTCGGAAGAATCGTATTTGTTATCTACAGGAGAT | |
| NC_002737.2 | TTTTTCAAATGAGATGGCGAAAGTAGATGATAGTTTCTTTCATCGACTTGAA | |
| | GAGTCTTTTTTGGTGGAAGAAGACAAGAAGCATGAACGTCATCCTATTTTT | |
| | GGAAATATAGTAGATGAAGTTGCTTATCATGAGAAATATCCAACTATCTAT | |
| | CATCTGCGAAAAAAATTGGTAGATTCTACTGATAAAGCGGATTTGCGCTTA | |
| | ATCTATTTGGCCTTAGCGCATATGATTAAGTTTCGTGGTCATTTTTTGATTG | |
| | AGGGAGATTTAAATCCTGATAATAGTGATGTGGACAAACTATTTATCCAGT | |
| | TGGTACAAACCTACAATCAATTATTTGAAGAAAACCCTATTAACGCAAGTG | |
| | GAGTAGATGCTAAAGCGATTCTTTCTGCACGATTGAGTAAATCAAGACGAT | |
| | TAGAAAATCTCATTGCTCAGCTCCCCGGTGAGAAGAAAAATGGCTTATTTG | |
| | GGAATCTCATTGCTTTGTCATTGGGTTTGACCCCTAATTTTAAATCAAATTT | |
| | TGATTTGGCAGAAGATGCTAAATTACAGCTTTCAAAAGATACTTACGATGA | |
| | TGATTTAGATAATTTATTGGCGCAAATTGGAGATCAATATGCTGATTTGTTT | |
| | TTGGCAGCTAAGAATTTATCAGATGCTATTTTACTTTCAGATATCCTAAGAG | |
| | TAAATACTGAAATAACTAAGGCTCCCCTATCAGCTTCAATGATTAAACGCT | |
| | ACGATGAACATCATCAAGACTTGACTCTTTTAAAAGCTTTAGTTCGACAAC | |
| | AACTTCCAGAAAAGTATAAAGAAATCTTTTTTGATCAATCAAAAAACGGAT | |
| | ATGCAGGTTATATTGATGGGGGAGCTAGCCAAGAAGAATTTTATAAATTTA | |
| | TCAAACCAATTTTAGAAAAAATGGATGGTACTGAGGAATTATTGGTGAAAC | |
| | TAAATCGTGAAGATTTGCTGCGCAAGCAACGGACCTTTGACAACGGCTCTA | |
| | TTCCCCATCAAATTCACTTGGGTGAGCTGCATGCTATTTTGAGAAGACAAG | |
| | AAGACTTTTATCCATTTTTAAAAGACAATCGTGAGAAGATTGAAAAAATCT | |
| | TGACTTTTCGAATTCCTTATTATGTTGGTCCATTGGCGCGTGGCAATAGTCG | |
| | TTTTGCATGGATGACTCGGAAGTCTGAAGAAACAATTACCCCATGGAATTT | |
| | TGAAGAAGTTGTCGATAAAGGTGCTTCAGCTCAATCATTTATTGAACGCAT | |
| | GACAAACTTTGATAAAAATCTTCCAAATGAAAAAGTACTACCAAAACATAG | |
| | TTTGCTTTATGAGTATTTTACGGTTTATAACGAATTGACAAAGGTCAAATAT | |
| | GTTACTGAAGGAATGCGAAAACCAGCATTTCTTTCAGGTGAACAGAAGAA | |
| | AGCCATTGTTGATTTACTCTTCAAAACAAATCGAAAAGTAACCGTTAAGCA | |
| | ATTAAAAGAAGATTATTTCAAAAAAATAGAATGTTTTGATAGTGTTGAAAT | |
| | TTCAGGAGTTGAAGATAGATTTAATGCTTCATTAGGTACCTACCATGATTTG | |
| | CTAAAAATTATTAAAGATAAAGATTTTTTGGATAATGAAGAAAATGAAGAT | |
| | ATCTTAGAGGATATTGTTTTAACATTGACCTTATTTGAAGATAGGGAGATG | |
| | ATTGAGGAAAGACTTAAAACATATGCTCACCTCTTTGATGATAAGGTGATG | |
| | AAACAGCTTAAACGTCGCCGTTATACTGGTTGGGGACGTTTGTCTCGAAAA | |
| | TTGATTAATGGTATTAGGGATAAGCAATCTGGCAAAACAATATTAGATTTT | |
| | TTGAAATCAGATGGTTTTGCCAATCGCAATTTTATGCAGCTGATCCATGATG | |
| | ATAGTTTGACATTTAAAGAAGACATTCAAAAAGCACAAGTGTCTGGACAAG | |
| | GCGATAGTTTACATGAACATATTGCAAATTTAGCTGGTAGCCCTGCTATTA | |
| | AAAAAGGTATTTTACAGACTGTAAAAGTTGTTGATGAATTGGTCAAAGTAA | |
| | TGGGGCGGCATAAGCCAGAAAATATCGTTATTGAAATGGCACGTGAAAAT | |
| | CAGACAACTCAAAAGGGCCAGAAAAATTCGCGAGAGCGTATGAAACGAAT | |
| | CGAAGAAGGTATCAAAGAATTAGGAAGTCAGATTCTTAAAGAGCATCCTGT | |
| | TGAAAATACTCAATTGCAAAATGAAAAGCTCTATCTCTATTATCTCCAAAA | |
| | TGGAAGAGACATGTATGTGGACCAAGAATTAGATATTAATCGTTTAAGTGA | |
| | TTATGATGTCGATCACATTGTTCCACAAAGTTTCCTTAAAGACGATTCAATA | |
| | GACAATAAGGTCTTAACGCGTTCTGATAAAAATCGTGGTAAATCGGATAAC | |
| | GTTCCAAGTGAAGAAGTAGTCAAAAAGATGAAAAACTATTGGAGACAACT | |
| | TCTAAACGCCAAGTTAATCACTCAACGTAAGTTTGATAATTTAACGAAAGC | |
| | TGAACGTGGAGGTTTGAGTGAACTTGATAAAGCTGGTTTTATCAAACGCCA | |
| | ATTGGTTGAAACTCGCCAAATCACTAAGCATGTGGCACAAATTTTGGATAG | |
| | TCGCATGAATACTAAATACGATGAAAATGATAAACTTATTCGAGAGGTTAA | |
| | AGTGATTACCTTAAAATCTAAATTAGTTTCTGACTTCCGAAAAGATTTCCAA | |
| | TTCTATAAAGTACGTGAGATTAACAATTACCATCATGCCCATGATGCGTAT | |
| | CTAAATGCCGTCGTTGGAACTGCTTTGATTAAGAAATATCCAAAACTTGAA | |
| | TCGGAGTTTGTCTATGGTGATTATAAAGTTTATGATGTTCGTAAAATGATTG | |
| | CTAAGTCTGAGCAAGAAATAGGCAAAGCAACCGCAAAATATTTCTTTTACT | |
| | CTAATATCATGAACTTCTTCAAAACAGAAATTACACTTGCAAATGGAGAGA | |
| | TTCGCAAACGCCCTCTAATCGAAACTAATGGGGAAACTGGAGAAATTGTCT | |
| | GGGATAAAGGGCGAGATTTTGCCACAGTGCGCAAAGTATTGTCCATGCCCC | |
| | AAGTCAATATTGTCAAGAAAACAGAAGTACAGACAGGCGGATTCTCCAAG | |
| | GAGTCAATTTTACCAAAAAGAAATTCGGACAAGCTTATTGCTCGTAAAAAA | |
| | GACTGGGATCCAAAAAAATATGGTGGTTTTGATAGTCCAACGGTAGCTTAT | |
| | TCAGTCCTAGTGGTTGCTAAGGTGGAAAAAGGGAAATCGAAGAAGTTAAA | |
| | ATCCGTTAAAGAGTTACTAGGGATCACAATTATGGAAAGAAGTTCCTTTGA | |
| | AAAAAATCCGATTGACTTTTTAGAAGCTAAAGGATATAAGGAAGTTAAAA | |
| | AAGACTTAATCATTAAACTACCTAAATATAGTCTTTTTGAGTTAGAAAACG | |
| | GTCGTAAACGGATGCTGGCTAGTGCCGGAGAATTACAAAAAGGAAATGAG | |
| | CTGGCTCTGCCAAGCAAATATGTGAATTTTTTATATTTAGCTAGTCATTATG | |
| | AAAAGTTGAAGGGTAGTCCAGAAGATAACGAACAAAAACAATTGTTTGTG | |
| | GAGCAGCATAAGCATTATTTAGATGAGATTATTGAGCAAATCAGTGAATTT | |
| | TCTAAGCGTGTTATTTTAGCAGATGCCAATTTAGATAAAGTTCTTAGTGCAT | |
| | ATAACAAACATAGAGACAAACCAATACGTGAACAAGCAGAAAATATTATT | |
| | CATTTATTTACGTTGACGAATCTTGGAGCTCCCGCTGCTTTTAAATATTTTG | |
| | ATACAACAATTGATCGTAAACGATATACGTCTACAAAAGAAGTTTTAGATG | |
| | CCACTCTTATCCATCAATCCATCACTGGTCTTTATGAAACACGCATTGATTT | |
| | GAGTCAGCTAGGAGGTGACTGA | |
| SpCas9 | MDKKYSIGLDIGTNSVGWAVITDEYKVPSKKFKVLGNTDRHSIKKNLIGALLF | 59 |
| Streptococcus | DSGETAEATRLKRTARRRYTRRKNRICYLQEIFSNEMAKVDDSFFHRLEESFLV | |
| pyogenes | EEDKKHERHPIFGNIVDEVAYHEKYPTIYHLRKKLVDSTDKADLRLIYLALAH | |
| MGAS wild | MIKFRGHFLIEGDLNPDNSDVDKLFIQLVQTYNQLFEENPINASGVDAKAILSA | |
| type | RLSKSRRLENLIAQLPGEKKNGLFGNLIALSLGLTPNFKSNFDLAEDAKLQLSK | |
| Encoded | DTYDDDLDNLLAQIGDQYADLFLAAKNLSDAILLSDILRVNTEITKAPLSASMI | |
| product of | KRYDEHHQDLTLLKALVRQQLPEKYKEIFFDQSKNGYAGYIDGGASQEEFYKF | |
| NC_002737.2 | IKPILEKMDGTEELLVKLNREDLLRKQRTFDNGSIPHQIHLGELHAILRRQEDFY | |
| (100% | PFLKDNREKIEKILTFRIPYYVGPLARGNSRFAWMTRKSEETITPWNFEEVVDK | |
| identical to | GASAQSFIERMTNFDKNLPNEKVLPKHSLLYEYFTVYNELTKVKYVTEGMRKP | |
| the canonical | AFLSGEQKKAIVDLLFKTNRKVTVKQLKEDYFKKIECFDSVEISGVEDRFNASL | |
| Q99ZW2 | GTYHDLLKIIKDKDFLDNEENEDILEDIVLTLTLFEDREMIEERLKTYAHLFDDK | |
| wild type) | VMKQLKRRRYTGWGRLSRKLINGIRDKQSGKTILDFLKSDGFANRNFMQLIHD | |
| | DSLTFKEDIQKAQVSGQGDSLHEHIANLAGSPAIKKGILQTVKVVDELVKVMG | |
| | RHKPENIVIEMARENQTTQKGQKNSRERMKRIEEGIKELGSQILKEHPVENTQL | |
| | QNEKLYLYYLQNGRDMYVDQELDINRLSDYDVDHIVPQSFLKDDSIDNKVLT | |
| | RSDKNRGKSDNVPSEEVVKKMKNYWRQLLNAKLITQRKFDNLTKAERGGLSE | |
| | LDKAGFIKRQLVETRQITKHVAQILDSRMNTKYDENDKLIREVKVITLKSKLVS | |
| | DFRKDFQFYKVREINNYHHAHDAYLNAVVGTALIKKYPKLESEFVYGDYKVY | |
| | DVRKMIAKSEQEIGKATAKYFFYSNIMNFFKTEITLANGEIRKRPLIETNGETGE | |
| | IVWDKGRDFATVRKVLSMPQVNIVKKTEVQTGGFSKESILPKRNSDKLIARKK | |
| | DWDPKKYGGFDSPTVAYSVLVVAKVEKGKSKKLKSVKELLGITIMERSSFEKN | |
| | PIDFLEAKGYKEVKKDLIIKLPKYSLFELENGRKRMLASAGELQKGNELALPSK | |
| | YVNFLYLASHYEKLKGSPEDNEQKQLFVEQHKHYLDEIIEQISEFSKRVILADA | |
| | NLDKVLSAYNKHRDKPIREQAENIIHLFTLTNLGAPAAFKYFDTTIDRKRYTST | |
| | KEVLDATLIHQSITGLYETRIDLSQLGGD | |

[0290] The base editors described herein may include any of the above SpCas9 sequences, or any variant thereof having at least 80%, at least 85%, at least 90%, at least 95%, or at least 99% sequence identity thereto.

### (2) Wild Type Cas9 Orthologs

[0291] In other embodiments, the Cas9 protein can be a wild type Cas9 ortholog from another bacterial species. For example, the following Cas9 orthologs can be used in connection with the base editor constructs described in this specification. In addition, any variant Cas9 orthologs having at least 80%, at least 85%, at least 90%, at least 95%, or at least 99% sequence identity to any of the below orthologs may also be used with the present base editors.

| Description | Sequence |
|---|---|
| LfCas9 | MKEYHIGLDIGTSSIGWAVTDSQFKLMRIKGKTAIGVRLFEEGKTAAERRTFRTTRRRLKR |
| Lactobacillus | RKWRLHYLDEIFAPHLQEVDENFLRRLKQSNIHPEDPTKNQAFIGKLLFPDLLKKNERGYP |
| fermentum wild | TLIKMRDELPVEQRAHYPVMNIYKLREAMINEDRQFDLREVYLAVHHIVKYRGHFLNNA |
| type | SVDKFKVGRIDFDKSFNVLNEAYEELQNGEGSFTIEPSKVEKIGQLLLDTKMRKLDRQKA |
| GenBank: | VAKLLEVKVADKEETKRNKQIATAMSKLVLGYKADFATVAMANGNEWKIDLSSETSED |
| SNX31424.11 | EIEKFREELSDAQNDILTEITSLFSQIMLNEIVPNGMSISESMMDRYWTHERQLAEVKEYLA |
| | TQPASARKEFDQVYNKYIGQAPKERGFDLEKGLKKILSKKENWKEIDELLKAGDFLPKQR |
| | TSANGVIPHQMHQQELDRIIEKQAKYYPWLATENPATGERDRHQAKYELDQLVSFRIPYY |
| | VGPLVTPEVQKATSGAKFAWAKRKEDGEITPWNLWDKIDRAESAEAFIKRMTVKDTYLL |
| | NEDVLPANSLLYQKYNVLNELNNVRVNGRRLSVGIKQDIYTELFKKKKTVKASDVASLV |
| | MAKTRGVNKPSVEGLSDPKKFNSNLATYLDLKSIVGDKVDDNRYQTDLENIIEWRSVFED |
| | GEIFADKLTEVEWLTDEQRSALVKKRYKGWGRLSKKLLTGIVDENGQRIIDLMWNTDQN |
| | FKEIVDQPVFKEQIDQLNQKAITNDGMTLRERVESVLDDAYTSPQNKKAIWQVVRVVEDI |
| | VKAVGNAPKSISIEFARNEGNKGEITRSRRTQLQKLFEDQAHELVKDTSLTEELEKAPDLS |
| | DRYYFYFTQGGKDMYTGDPINFDEISTKYDIDHILPQSFVKDNSLDNRVLTSRKENNKKS |
| | DQVPAKLYAAKMKPYWNQLLKQGLITQRKFENLTKDVDQNIKYRSLGFVKRQLVETRQ |
| | VIKLTANILGSMYQEAGTEIIETRAGLTKQLREEFDLPKVREVNDYHHAVDAYLTTFAGQ |
| | YLNRRYPKLRSFFVYGEYMKFKHGSDLKLRNFNFFHELMEGDKSQGKVVDQQTGELITT |
| | RDEVAKSFDRLLNMKYMLVSKEVHDRSDQLYGATIVTAKESGKLTSPIEIKKNRLVDLYG |
| | AYTNGTSAFMTIIKFTGNKPKYKVIGIPTTSAASLKRAGKPGSESYNQELHRIIKSNPKVKK |
| | GFEIVVPHVSYGQLIVDGDCKFTLASPTVQHPATQLVLSKKSLETISSGYKILKDKPAIANE |
| | RLIRVFDEVVGQMNRYFTIFDQRSNRQKVADARDKFLSLPTESKYEGAKKVQVGKTEVIT |
| | NLLMGLHANATQGDLKVLGLATFGFFQSTTGLSLSEDTMIVYQSPTGLFERRICLKDI |
| | (SEQ ID NO: 66) |
| SaCas9 | MDKKYSIGLDIGTNSVGWAVITDEYKVPSKKFKVLGNTDRHSIKKNLIGALLFDSGETAE |
| Staphylococcus | ATRLKRTARRRYTRRKNRICYLQEIFSNEMAKVDDSFFHRLEESFLVEEDKKHERHPIFGN |
| aureus wild type | IVDEVAYHEKYPTIYHLRKKLVDSTDKADLRLIYLALAHMIKFRGHFLIEGDLNPDNSDVD |
| GenBank: | KLFIQLVQTYNQLFEENPINASGVDAKAILSARLSKSRRLENLIAQLPGEKKNGLFGNLIAL |
| AYD60528.1 | SLGLTPNFKSNFDLAEDAKLQLSKDTYDDDLDNLLAQIGDQYADLFLAAKNLSDAILLSDI |
| | LRVNTEITKAPLSASMIKRYDEHHQDLTLLKALVRQQLPEKYKEIFFDQSKNGYAGYIDG |
| | GASQEEFYKFIKPILEKMDGTEELLVKLNREDLLRKQRTFDNGSIPHQIHLGELHAILRRQE |
| | DFYPFLKDNREKIEKILTFRIPYYVGPLARGNSRFAWMTRKSEETITPWNFEEVVDKGASA |
| | QSFIERMTNFDKNLPNEKVLPKHSLLYEYFTVYNELTKVKYVTEGMRKPAFLSGEQKKAI |
| | VDLLFKTNRKVTVKQLKEDYFKKIECFDSVEISGVEDRFNASLGTYHDLLKIIKDKDFLDN |
| | EENEDILEDIVLTLTLFEDREMIEERLKTYAHLFDDKVMKQLKRRRYTGWGRLSRKLINGI |
| | RDKQSGKTILDFLKSDGFANRNFMQLIHDDSLTFKEDIQKAQVSGQGDSLHEHIANLAGSP |
| | AIKKGILQTVKVVDELVKVMGRHKPENIVIEMARENQTTQKGQKNSRERMKRIEEGIKEL |
| | GSQILKEHPVENTQLQNEKLYLYYLQNGRDMYVDQELDINRLSDYDVDHIVPQSFLKDDS |
| | IDNKVLTRSDKNRGKSDNVPSEEVVKKMKNYWRQLLNAKLITQRKFDNLTKAERGGLSE |
| | LDKAGFIKRQLVETRQITKHVAQILDSRMNTKYDENDKLIREVKVITLKSKLVSDFRKDFQ |
| | FYKVREINNYHHAHDAYLNAVVGTALIKKYPKLESEFVYGDYKVYDVRKMIAKSEQEIG |
| | KATAKYFFYSNIMNFFKTEITLANGEIRKRPLIETNGETGEIVWDKGRDFATVRKVLSMPQ |
| | VNIVKKTEVQTGGFSKESILPKRNSDKLIARKKDWDPKKYGGFDSPTVAYSVLVVAKVEK |
| | GKSKKLKSVKELLGITIMERSSFEKNPIDFLEAKGYKEVKKDLIIKLPKYSLFELENGRKRM |
| | LASAGELQKGNELALPSKYVNFLYLASHYEKLKGSPEDNEQKQLFVEQHKHYLDEIIEQIS |
| | EFSKRVILADANLDKVLSAYNKHRDKPIREQAENIIHLFTLTNLGAPAAFKYFDTTIDRKR |
| | YTSTKEVLDATLIHQSITGLYETRIDLSQLGGD (SEQ ID NO: 59) |
| SaCas9 | MGKRNYILGLDIGITSVGYGIIDYETRDVIDAGVRLFKEANVENNEGRRSKRGARRLKRR |
| Staphylococcus | RRHRIQRVKKLLFDYNLLTDHSELSGINPYEARVKGLSQKLSEEEFSAALLHLAKRRGVH |
| aureus | NVNEVEEDTGNELSTKEQISRNSKALEEKYVAELQLERLKKDGEVRGSINRFKTSDYVKE |
| | AKQLLKVQKAYHQLDQSFIDTYIDLLETRRTYYEGPGEGSPFGWKDIKEWYEMLMGHCT |
| | YFPEELRSVKYAYNADLYNALNDLNNLVITRDENEKLEYYEKFQIIENVFKQKKKPTLKQI |
| | AKEILVNEEDIKGYRVTSTGKPEFTNLKVYHDIKDITARKEIIENAELLDQIAKILTIYQSSE |
| | DIQEELTNLNSELTQEEIEQISNLKGYTGTHNLSLKAINLILDELWHTNDNQIAIFNRLKLVP |
| | KKVDLSQQKEIPTTLVDDFILSPVVKRSFIQSIKVINAIIKKYGLPNDIIIELAREKNSKDAQK |
| | MINEMQKRNRQTNERIEEIIRTTGKENAKYLIEKIKLHDMQEGKCLYSLEAIPLEDLLNNPF |
| | NYEVDHIIPRSVSFDNSFNNKVLVKQEENSKKGNRTPFQYLSSSDSKISYETFKKHILNLAK |
| | GKGRISKTKKEYLLEERDINRFSVQKDFINRNLVDTRYATRGLMNLLRSYFRVNNLDVKV |
| | KSINGGFTSFLRRKWKFKKERNKGYKHHAEDALIIANADFIFKEWKKLDKAKKVMENQM |
| | FEEKQAESMPEIETEQEYKEIFITPHQIKHIKDFKDYKYSHRVDKKPNRKLINDTLYSTRKD |
| | DKGNTLIVNNLNGLYDKDNDKLKKLINKSPEKLLMYHHDPQTYQKLKLIMEQYGDEKNP |
| | LYKYYEETGNYLTKYSKKDNGPVIKKIKYYGNKLNAHLDITDDYPNSRNKVVKLSLKPY |
| | RFDVYLDNGVYKFVTVKNLDVIKKENYYEVNSKCYEEAKKLKKISNQAEFIASFYKNDLI |
| | KINGELYRVIGVNNDLLNRIEVNMIDITYREYLENMNDKRPPHIIKTIASKTQSIKKYSTDIL |
| | GNLYEVKSKKHPQIIKK |
| | (SEQ ID NO: 67) |
| StCas9 | MLFNKCIIISINLDFSNKEKCMTKPYSIGLDIGTNSVGWAVITDNYKVPSKKMKVLGNTSK |
| Streptococcus | KYIKKNLLGVLLFDSGITAEGRRLKRTARRRYTRRRNRILYLQEIFSTEMATLDDAFFQRL |
| thermophilus | DDSFLVPDDKRDSKYPIFGNLVEEKVYHDEFPTIYHLRKYLADSTKKADLRLVYLALAHM |
| UniProtKB/ | IKYRGHFLIEGEFNSKNNDIQKNFQDFLDTYNAIFESDLSLENSKQLEEIVKDKISKLEKKD |
| Swiss-Prot: | RILKLFPGEKNSGIFSEFLKLIVGNQADFRKCFNLDEKASLHFSKESYDEDLETLLGYIGDD |
| G3ECR1.2 | YSDVFLKAKKLYDAILLSGFLTVTDNETEAPLSSAMIKRYNEHKEDLALLKEYIRNISLKT |
| Wild type | YNEVFKDDTKNGYAGYIDGKTNQEDFYVYLKNLLAEFEGADYFLEKIDREDFLRKQRTF |
| | DNGSIPYQIHLQEMRAILDKQAKFYPFLAKNKERIEKILTFRIPYYVGPLARGNSDFAWSIR |
| | KRNEKITPWNFEDVIDKESSAEAFINRMTSFDLYLPEEKVLPKHSLLYETFNVYNELTKVR |
| | FIAESMRDYQFLDSKQKKDIVRLYFKDKRKVTDKDIIEYLHAIYGYDGIELKGIEKQFNSSL |
| | STYHDLLNIINDKEFLDDSSNEAIIEEIIHTLTIFEDREMIKQRLSKFENIFDKSVLKKLSRRH |
| | YTGWGKLSAKLINGIRDEKSGNTILDYLIDDGISNRNFMQLIHDDALSFKKKIQKAQIIGDE |
| | DKGNIKEVVKSLPGSPAIKKGILQSIKIVDELVKVMGGRKPESIVVEMARENQYTNQGKSN |
| | SQQRLKRLEKSLKELGSKILKENIPAKLSKIDNNALQNDRLYLYYLQNGKDMYTGDDLDI |
| | DRLSNYDIDHIIPQAFLKDNSIDNKVLVSSASNRGKSDDFPSLEVVKKRKTFWYQLLKSKL |
| | ISQRKFDNLTKAERGGLLPEDKAGFIQRQLVETRQITKHVARLLDEKENNKKDENNRAVR |
| | TVKIITLKSTLVSQFRKDFELYKVREINDFHHAHDAYLNAVIASALLKKYPKLEPEFVYGD |
| | YPKYNSFRERKSATEKVYFYSNIMNIFKKSISLADGRVIERPLIEVNEETGESVWNKESDLA |
| | TVRRVLSYPQVNVVKKVEEQNHGLDRGKPKGLFNANLSSKPKPNSNENLVGAKEYLDPK |
| | KYGGYAGISNSFAVLVKGTIEKGAKKKITNVLEFQGISILDRINYRKDKLNFLLEKGYKDIE |
| | LIIELPKYSLFELSDGSRRMLASILSTNNKRGEIHKGNQIFLSQKFVKLLYHAKRISNTINEN |
| | HRKYVENHKKEFEELFYYILEFNENYVGAKKNGKLLNSAFQSWQNHSIDELCSSFIGPTGS |
| | ERKGLFELTSRGSAADFEFLGVKIPRYRDYTPSSLLKDATLIHQSVTGLYETRIDLAKLGEG |
| | (SEQ ID NO: 68) |
| LcCas9 | MKIKNYNLALTPSTSAVGHVEVDDDLNILEPVHHQKAIGVAKFGEGETAEARRLARSARR |
| Lactobacillus | TTKRRANRINHYFNEIMKPEIDKVDPLMFDRIKQAGLSPLDERKEFRTVIFDRPNIASYYHN |
| crispatus | QFPTIWHLQKYLMITDEKADIRLIYWALHSLLKHRGHFFNTTPMSQFKPGKLNLKDDMLA |
| NCBI Reference | LDDYNDLEGLSFAVANSPEIEKVIKDRSMHKKEKIAELKKLIVNDVPDKDLAKRNNKIITQ |
| Sequence: | IVNAIMGNSFHLNFIFDMDLDKLTSKAWSFKLDDPELDTKFDAISGSMTDNQIGIFETLQKI |
| WP_133478044.1 | YSAISLLDILNGSSNVVDAKNALYDKHKRDLNLYFKFLNTLPDEIAKTLKAGYTLYIGNRK |
| Wild type | KDLLAARKLLKVNVAKNFSQDDFYKLINKELKSIDKQGLQTRFSEKVGELVAQNNFLPV |
| | QRSSDNVFIPYQLNAITFNKILENQGKYYDFLVKPNPAKKDRKNAPYELSQLMQFTIPYYV |
| | GPLVTPEEQVKSGIPKTSRFAWMVRKDNGAITPWNFYDKVDIEATADKFIKRSIAKDSYLL |
| | SELVLPKHSLLYEKYEVFNELSNVSLDGKKLSGGVKQILFNEVFKKTNKVNTSRILKALA |
| | KHNIPGSKITGLSNPEEFTSSLQTYNAWKKYFPNQIDNFAYQQDLEKMIEWSTVFEDHKIL |
| | AKKLDEIEWLDDDQKKFVANTRLRGWGRLSKRLLTGLKDNYGKSIMQRLETTKANFQQI |
| | VYKPEFREQIDKISQAAAKNQSLEDILANSYTSPSNRKAIRKTMSVVDEYIKLNHGKEPDK |
| | IFLMFQRSEQEKGKQTEARSKQLNRILSQLKADKSANKLFSKQLADEFSNAIKKSKYKLN |
| | DKQYFYFQQLGRDALTGEVIDYDELYKYTVLHIIPRSKLTDDSQNNKVLTKYKIVDGSVA |
| | LKFGNSYSDALGMPIKAFWTELNRLKLIPKGKLLNLTTDFSTLNKYQRDGYIARQLVETQ |
| | QIVKLLATIMQSRFKHTKIIEVRNSQVANIRYQFDYFRIKNLNEYYRGFDAYLAAVVGTYL |
| | YKVYPKARRLFVYGQYLKPKKTNQENQDMHLDSEKKSQGFNFLWNLLYGKQDQIFVNG |
| | TDVIAFNRKDLITKMNTVYNYKSQKISLAIDYHNGAMFKATLFPRNDRDTAKTRKLIPKK |
| | KDYDTDIYGGYTSNVDGYMLLAEIIKRDGNKQYGFYGVPSRLVSELDTLKKTRYTEYEEK |
| | LKEIIKPELGVDLKKIKKIKILKNKVPFNQVIIDKGSKFFITSTSYRWNYRQLILSAESQQTL |
| | MDLVVDPDFSNHKARKDARKNADERLIKVYEEILYQVKNYMPMFVELHRCYEKLVDAQ |
| | KTFKSLKISDKAMVLNQILILLHSNATSPVLEKLGYHTRFTLGKKHNLISENAVLVTQSITG |
| | LKENHVSIKQML (SEQ ID NO: 69) |
| PdCas9 | MTNEKYSIGLDIGTSSIGFAVVNDNNRVIRVKGKNAIGVRLFDEGKAAADRRSFRTTRRSF |
| Pedicoccus | RTTRRRLSRRRWRLKLLREIFDAYITPVDEAFFIRLKESNLSPKDSKKQYSGDILFNDRSDK |
| damnosus | DFYEKYPTIYHLRNALMTEHRKFDVREIYLAIHHIMKFRGHFLNATPANNFKVGRLNLEE |
| NCBI Reference | KFEELNDIYQRVFPDESIEFRTDNLEQIKEVLLDNKRSRADRQRTLVSDIYQSSEDKDIEKR |
| Sequence: | NKAVATEILKASLGNKAKLNVITNVEVDKEAAKEWSITFDSESIDDDLAKIEGQMTDDGH |
| WP_062913273.1 | EIIEVLRSLYSGITLSAIVPENHTLSQSMVAKYDLHKDHLKLFKKLINGMTDTKKAKNLRA |
| Wild type | AYDGYIDGVKGKVLPQEDFYKQVQVNLDDSAEANEIQTYIDQDIFMPKQRTKANGSIPHQ |
| | LQQQELDQIIENQKAYYPWLAELNPNPDKKRQQLAKYKLDELVTFRVPYYVGPMITAKD |
| | QKNQSGAEFAWMIRKEPGNITPWNFDQKVDRMATANQFIKRMTTTDTYLLGEDVLPAQS |
| | LLYQKFEVLNELNKIRIDHKPISIEQKQQIFNDLFKQFKNVTIKHLQDYLVSQGQYSKRPLI |
| | EGLADEKRFNSSLSTYSDLCGIFGAKLVEENDRQEDLEKIIEWSTIFEDKKIYRAKLNDLT |
| | WLTDDQKEKLATKRYQGWGRLSRKLLVGLKNSEHRNIMDILWITNENFMQIQAEPDFAK |
| | LVTDANKGMLEKTDSQDVINDLYTSPQNKKAIRQILLVVHDIQNAMHGQAPAKIHVEFAR |
| | GEERNPRRSVQRQRQVEAAYEKVSNELVSAKVRQEFKEAINNKRDFKDRLFLYFMQGGI |
| | DIYTGKQLNIDQLSSYQIDHILPQAFVKDDSLTNRVLTNENQVKADSVPIDIFGKKMLSVW |
| | GRMKDQGLISKGKYRNLTMNPENISAHTENGFINRQLVETRQVIKLAVNILADEYGDSTQI |
| | ISVKADLSHQMREDFELLKNRDVNDYHHAFDAYLAAFIGNYLLKRYPKLESYFVYGDFK |
| | KFTQKETKMRRFNFIYDLKHCDQVVNKETGEILWTKDEDIKYIRHLFAYKKILVSHEVRE |
| | KRGALYNQTIYKAKDDKGSGQESKKLIRIKDDKETKIYGGYSGKSLAYMTIVQITKKNKV |
| | SYRVIGIPTLALARLNKLENDSTENNGELYKIIKPQFTHYKVDKKNGEIIETTDDFKIVVSK |
| | VRFQQLIDDAGQFFMLASDTYKNNAQQLVISNNALKAINNTNITDCPRDDLERLDNLRLD |
| | SAFDEIVKKMDKYFSAYDANNFREKIRNSNLIFYQLPVEDQWENNKITELGKRTVLTRILQ |
| | GLHANATTTDMSIFKIKTPFGQLRQRSGISLSENAQLIYQSPTGLFERRVQLNKIK |
| | (SEQ ID NO: 70) |
| FnCas9 | MKKQKFSDYYLGFDIGTNSVGWCVTDLDYNVLRFNKKDMWGSRLFEEAKTAAERRVQ |
| Fusobaterium | RNSRRRLKRRKWRLNLLEEIFSNEILKIDSNFFRRLKESSLWLEDKSSKEKFTLENDDNYK |
| nucleatum | DYDFYKQYPTIFHLRNELIKNPEKKDIRLVYLAIHSIFKSRGHFLFEGQNLKEIKNFETLYN |
| NCBI Reference | NLIAFLEDNGINKIIDKNNIEKLEKIVCDSKKGLKDKEKEFKEIFNSDKQLVAIFKLSVGSSV |
| Sequence: | SLNDLFDTDEYKKGEVEKEKISFREQIYEDDKPIYYSILGEKIELLDIAKTFYDFMVLNNILA |
| WP_060798984.1 | DSQYISEAKVKLYEEHKKDLKNLKYIIRKYNKGNYDKLFKDKNENNYSAYIGLNKEKSK |
| | KEVIEKSRLKIDDLIKNIKGYLPKVEEIEEKDKAIFNKILNKIELKTILPKQRISDNGTLPYQI |
| | HEAELEKILENQSKYYDFLNYEENGIITKDKLLMTFKFRIPYYVGPLNSYHKDKGGNSWIV |
| | RKEEGKILPWNFEQKVDIEKSAEEFIKRMTNKCTYLNGEDVIPKDTFLYSEYVILNELNKV |
| | QVNDEFLNEENKRKIIDELFKENKKVSEKKFKEYLLVKQIVDGTIELKGVKDSFNSNYISYI |
| | RFKDIFGEKLNLDIYKEISEKSILWKCLYGDDKKIFEKKIKNEYGDILTKDEIKKINTFKENN |
| | WGRLSEKLLTGIEFINLETGECYSSVMDALRRTNYNLMELLSSKFTLQESINNENKEMNEA |
| | SYRDLIEESYVSPSLKRAIFQTLKIYEEIRKITGRVPKKVFIEMARGGDESMKNKKIPARQE |
| | QLKKLYDSCGNDIANFSIDIKEMKNSLISYDNNSLRQKKLYLYYLQFGKCMYTGREIDLD |
| | RLLQNNDTYDIDHIYPRSKVIKDDSFDNLVLVLKNENAEKSNEYPVKKEIQEKMKSFWRF |
| | LKEKNFISDEKYKRLTGKDDFELRGFMARQLVNVRQTTKEVGKILQQIEPEIKIVYSKAEI |
| | ASSFREMFDFIKVRELNDTHHAKDAYLNIVAGNVYNTKFTEKPYRYLQEIKENYDVKKIY |
| | NYDIKNAWDKENSLEIVKKNMEKNTVNITRFIKEKKGQLFDLNPIKKGETSNEIISIKPKVY |
| | NGKDDKLNEKYGYYKSLNPAYFLYVEHKEKNKRIKSFERVNLVDVNNIKDEKSLVKYLI |
| | ENKKLVEPRVIKKVYKRQVILINDYPYSIVTLDSNKLMDFENLKPLFLENKYEKILKNVIKF |
| | LEDNQGKSEENYKFIYLKKKDRYEKNETLESVKDRYNLEFNEMYDKFLEKLDSKDYKNY |
| | MNNKKYQELLDVKEKFIKLNLFDKAFTLKSFLDLFNRKTMADFSKVGLTKYLGKIQKISS |
| | NVLSKNELYLLEESVTGLFVKKIKL (SEQ ID NO: 71) |
| EcCas9 | MNKYYLGLDMGSASVGWAVTDENYHLVRRKGKDLWGVRTFDVAQTAKERRITRGNRR |
| Enterococcus | RQDRRKQRIQILQELLGEEVLKTDPGFFHRMKESRYVVEDKRTLDGKQVELPYALFVDK |
| cecorum | DYTDKEYYKQFPTINHLIVYLMTTSDTPDIRLVYLALHYYMKNRGNFLHSGDINNVKDIN |
| NCBI Reference | DILEQLDNVLETFLDGWNLKLKSYVEDIKNIYNRDLGRGERKKAFVNTLGAKTKAEKAF |
| Sequence: | CSLISGGSTNLAELFDDSSLKEIETPKIEFASSSLEDKIDGIQEALEDRFAVIEAAKRLYDWK |
| WP_047338501.1 | TLTDILGDSSSLAEARVNSYQMHHEQLLELKSLVKEYLDRKVFQEVFVSLNVANNYPAYI |
| Wild type | GHTKINGKKKELEVKRTKRNDFYSYVKKQVIEPIKKKVSDEAVLTKLSEIESLIEVDKYLP |
| | LQVNSDNGVIPYQVKLNELTRIFDNLENRIPVLRENRDKIIKTFKFRIPYYVGSLNGVVKNG |
| | KCTNWMVRKEEGKIYPWNFEDKVDLEASAEQFIRRMTNKCTYLVNEDVLPKYSLLYSKY |
| | LVLSELNNLRIDGRPLDVKIKQDIYENVFKKNRKVTLKKIKKYLLKEGIITDDDALSGLAD |
| | DVKSSLTAYRDFKEKLGHLDLSEAQMENIILNITLFGDDKKLLKKRLAALYPFIDDKSLNR |
| | IATLNYRDWGRLSERFLSGITSVDQETGELRTIIQCMYETQANLMQLLAEPYHFVEAIEKE |
| | NPKVDLESISYRIVNDLYVSPAVKRQIWQTLLVIKDIKQVMKHDPERIFIEMAREKQESKK |
| | TKSRKQVLSEVYKKAKEYEHLFEKLNSLTEEQLRSKKIYLYFTQLGKCMYSGEPIDFENL |
| | VSANSNYDIDHIYPQSKTIDDSFNNIVLVKKSLNAYKSNHYPIDKNIRDNEKVKTLWNTLV |
| | SKGLITKEKYERLIRSTPFSDEELAGFIARQLVETRQSTKAVAEILSNWFPESEIVYSKAKN |
| | VSNFRQDFEILKVRELNDCHHAHDAYLNIVVGNAYHTKFTNSPYRFIKNKANQEYNLRKL |
| | LQKVNKIESNGVVAWVGQSENNPGTIATVKKVIRRNTVLISRMVKEVDGQLFDLTLMKK |
| | GKGQVPIKSSDERLTDISKYGGYNKATGAYFTFVKSKKRGKVVRSFEYVPLHLSKQFENN |
| | NELLKEYIEKDRGLTDVEILIPKVLINSLFRYNGSLVRITGRGDTRLLLVHEQPLYVSNSFV |
| | QQLKSVSSYKLKKSENDNAKLTKTATEKLSNIDELYDGLLRKLDLPIYSYWFSSIKEYLVE |
| | SRTKYIKLSIEEKALVIFEILHLFQSDAQVPNLKILGLSTKPSRIRIQKNLKDTDKMSIIHQSP |
| | SGIFEHEIELTSL (SEQ ID NO: 72) |
| AhCas9 | MQNGFLGITVSSEQVGWAVTNPKYELERASRKDLWGVRLFDKAETAEDRRMFRTNRRL |
| Anaerostipes | NQRKKNRIHYLRDIFHEEVNQKDPNFFQQLDESNFCEDDRTVEFNFDTNLYKNQFPTVYH |
| hadrus | LRKYLMETKDKPDIRLVYLAFSKFMKNRGHFLYKGNLGEVMDFENSMKGFCESLEKFNI |
| NCBI Reference | DFPTLSDEQVKEVRDILCDHKIAKTVKKKNIITITKVKSKTAKAWIGLFCGCSVPVKVLFQ |
| Sequence: | DIDEEIVTDPEKISFEDASYDDYIANIEKGVGIYYEAIVSAKMLFDWSILNEILGDHQLLSDA |
| WP_044924278.1 | MIAEYNKHHDDLKRLQKIIKGTGSRELYQDIFINDVSGNYVCYVGHAKTMSSADQKQFY |
| Wild type | TFLKNRLKNVNGISSEDAEWIDTEIKNGTLLPKQTKRDNSVIPHQLQLREFELILDNMQEM |
| | YPFLKENREKLLKIFNFVIPYYVGPLKGVVRKGESTNWMVPKKDGVIHPWNFDEMVDKE |
| | ASAECFISRMTGNCSYLFNEKVLPKNSLLYETFEVLNELNPLKINGEPISVELKQRIYEQLF |
| | LTGKKVTKKSLTKYLIKNGYDKDIELSGIDNEFHSNLKSHIDFEDYDNLSDEEVEQIILRITV |
| | FEDKQLLKDYLNREFVKLSEDERKQICSLSYKGWGNLSEMLLNGITVTDSNGVEVSVMD |
| | MLWNTNLNLMQILSKKYGYKAEIEHYNKEHEKTIYNREDLMDYLNIPPAQRRKVNQLITI |
| | VKSLKKTYGVPNKIFFKISREHQDDPKRTSSRKEQLKYLYKSLKSEDEKHLMKELDELND |
| | HELSNDKVYLYFLQKGRCIYSGKKLNLSRLRKSNYQNDIDYIYPLSAVNDRSMNNKVLTG |
| | IQENRADKYTYFPVDSEIQKKMKGFWMELVLQGFMTKEKYFRLSRENDFSKSELVSFIER |
| | EISDNQQSGRMIASVLQYYFPESKIVFVKEKLISSFKRDFHLISSYGHNHLQAAKDAYITIV |
| | VGNVYHTKFTMDPAIYFKNHKRKDYDLNRLFLENISRDGQIAWESGPYGSIQTVRKEYAQ |
| | NHIAVTKRVVEVKGGLFKQMPLKKGHGEYPLKTNDPRFGNIAQYGGYTNVTGSYFVLVE |
| | SMEKGKKRISLEYVPVYLHERLEDDPGHKLLKEYLVDHRKLNHPKILLAKVRKNSLLKID |
| | GFYYRLNGRSGNALILTNAVELIMDDWQTKTANKISGYMKRRAIDKKARVYQNEFHIQE |
| | LEQLYDFYLDKLKNGVYKNRKNNQAELIHNEKEQFMELKTEDQCVLLTEIKKLFVCSPM |
| | QADLTLIGGSKHTGMIAMSSNVTKADFAVIAEDPLGLRNKVIYSHKGEK (SEQ ID NO: 73) |
| KvCas9 | MSQNNNKIYNIGLDIGDASVGWAVVDEHYNLLKRHGKHMWGSRLFTQANTAVERRSSR |
| Kandleria | STRRRYNKRRERIRLLREIMEDMVLDVDPTFFIRLANVSFLDQEDKKDYLKENYHSNYNL |
| vitulina | FIDKDFNDKTYYDKYPTIYHLRKHLCESKEKEDPRLIYLALHHIVKYRGNFLYEGQKFSM |
| NCBI Reference | DVSNIEDKMIDVLRQFNEINLFEYVEDRKKIDEVLNVLKEPLSKKHKAEKAFALFDTTKD |
| Sequence: | NKAAYKELCAALAGNKFNVTKMLKEAELHDEDEKDISFKFSDATFDDAFVEKQPLLGDC |
| WP_031589969.1 | VEFIDLLHDIYSWVELQNILGSAHTSEPSISAAMIQRYEDHKNDLKLLKDVIRKYLPKKYF |
| Wild type | EVFRDEKSKKNNYCNYINHPSKTPVDEFYKYIKKLIEKIDDPDVKTILNKIELESFMLKQNS |
| | RTNGAVPYQMQLDELNKILENQSVYYSDLKDNEDKIRSILTFRIPYYFGPLNITKDRQFDW |
| | IIKKEGKENERILPWNANEIVDVDKTADEFIKRMRNFCTYFPDEPVMAKNSLTVSKYEVL |
| | NEINKLRINDHLIKRDMKDKMLHTLFMDHKSISANAMKKWLVKNQYFSNTDDIKIEGFQ |
| | KENACSTSLTPWIDFTKIFGKINESNYDFIEKIIYDVTVFEDKKILRRRLKKEYDLDEEKIKK |
| | ILKLKYSGWSRLSKKLLSGIKTKYKDSTRTPETVLEVMERTNMNLMQVINDEKLGFKKTI |
| | DDANSTSVSGKFSYAEVQELAGSPAIKRGIWQALLIVDEIKKIMKHEPAHVYIEFARNEDE |
| | KERKDSFVNQMLKLYKDYDFEDETEKEANKHLKGEDAKSKIRSERLKLYYTQMGKCMY |
| | TGKSLDIDRLDTYQVDHIVPQSLLKDDSIDNKVLVLSSENQRKLDDLVIPSSIRNKMYGFW |
| | EKLFNNKIISPKKFYSLIKTEFNEKDQERFINRQIVETRQITKHVAQIIDNHYENTKVVTVRA |
| | DLSHQFRERYHIYKNRDINDFHHAHDAYIATILGTYIGHRFESLDAKYIYGEYKRIFRNQK |
| | NKGKEMKKNNDGFILNSMRNIYADKDTGEIVWDPNYIDRIKKCFYYKDCFVTKKLEENN |
| | GTFFNVTVLPNDTNSDKDNTLATVPVNKYRSNVNKYGGFSGVNSFIVAIKGKKKKGKKV |
| | IEVNKLTGIPLMYKNADEEIKINYLKQAEDLEEVQIGKEILKNQLIEKDGGLYYIVAPTEIIN |
| | AKQLILNESQTKLVCEIYKAMKYKNYDNLDSEKIIDLYRLLINKMELYYPEYRKQLVKKF |
| | EDRYEQLKVISIEEKCNIIKQILATLHCNSSIGKIMYSDFKISTTIGRLNGRTISLDDISFIAESP |
| | TGMYSKKYKL (SEQ ID NO: 74) |
| EfCas9 | MRLFEEGHTAEDRRLKRTARRRISRRRNRLRYLQAFFEEAMTDLDENFFARLQESFLVPE |
| Enterococcus | DKKWHRHPIFAKLEDEVAYHETYPTIYHLRKKLADSSEQADLRLIYLALAHIVKYRGHFLI |
| faecalis | EGKLSTENTSVKDQFQQFMVIYNQTFVNGESRLVSAPLPESVLIEEELTEKASRTKKSEKV |
| NCBI Reference | LQQFPQEKANGLFGQFLKLMVGNKADFKKVFGLEEEAKITYASESYEEDLEGILAKVGDE |
| Sequence: | YSDVFLAAKNVYDAVELSTILADSDKKSHAKLSSSMIVRFTEHQEDLKKFKRFIRENCPDE |
| WP_016631044.1 | YDNLFKNEQKDGYAGYIAHAGKVSQLKFYQYVKKIIQDIAGAEYFLEKIAQENFLRKQRT |
| Wild type | FDNGVIPHQIHLAELQAIIHRQAAYYPFLKENQEKIEQLVTFRIPYYVGPLSKGDASTFAWL |
| | KRQSEEPIRPWNLQETVDLDQSATAFIERMTNFDTYLPSEKVLPKHSLLYEKFMVFNELTK |
| | ISYTDDRGIKANFSGKEKEKIFDYLFKTRRKVKKKDIIQFYRNEYNTEIVTLSGLEEDQFNA |
| | SFSTYQDLLKCGLTRAELDHPDNAEKLEDIIKILTIFEDRQRIRTQLSTFKGQFSAEVLKKLE |
| | RKHYTGWGRLSKKLINGIYDKESGKTILDYLVKDDGVSKHYNRNFMQLINDSQLSFKNAI |
| | QKAQSSEHEETLSETVNELAGSPAIKKGIYQSLKIVDELVAIMGYAPKRIVVEMARENQTT |
| | STGKRRSIQRLKIVEKAMAEIGSNLLKEQPTTNEQLRDTRLFLYYMQNGKDMYTGDELSL |
| | HRLSHYDIDHIIPQSFMKDDSLDNLVLVGSTENRGKSDDVPSKEVVKDMKAYWEKLYAA |
| | GLISQRKFQRLTKGEQGGLTLEDKAHFIQRQLVETRQITKNVAGILDQRYNAKSKEKKVQI |
| | ITLKASLTSQFRSIFGLYKVREVNDYHHGQDAYLNCVVATTLLKVYPNLAPEFVYGEYPK |
| | FQTFKENKATAKAIIYTNLLRFFTEDEPRFTKDGEILWSNSYLKTIKKELNYHQMNIVKKV |
| | EVQKGGFSKESIKPKGPSNKLIPVKNGLDPQKYGGFDSPVVAYTVLFTHEKGKKPLIKQEI |
| | LGITIMEKTRFEQNPILFLEEKGFLRPRVLMKLPKYTLYEFPEGRRRLLASAKEAQKGNQM |
| | VLPEHLLTLLYHAKQCLLPNQSESLAYVEQHQPEFQEILERVVDFAEVHTLAKSKVQQIV |
| | KLFEANQTADVKEIAASFIQLMQFNAMGAPSTFKFFQKDIERARYTSIKEIFDATIIYQSPTG |
| | LYETRRKVVD (SEQ ID NO: 75) |
| Staphylococcus | KRNYILGLDIGITSVGYGIIDYETRDVIDAGVRLFKEANVENNEGRRSKRGARRLKRRRRH |
| aureus Cas9 | RIQRVKKLLFDYNLLTDHSELSGINPYEARVKGLSQKLSEEEFSAALLHLAKRRGVHNVN |
| | EVEEDTGNELSTKEQISRNSKALEEKYVAELQLERLKKDGEVRGSINRFKTSDYVKEAKQ |
| | LLKVQKAYHQLDQSFIDTYIDLLETRRTYYEGPGEGSPFGWKDIKEWYEMLMGHCTYFP |
| | EELRSVKYAYNADLYNALNDLNNLVITRDENEKLEYYEKFQIIENVFKQKKKPTLKQIAK |
| | EILVNEEDIKGYRVTSTGKPEFTNLKVYHDIKDITARKEIIENAELLDQIAKILTIYQSSEDIQ |
| | EELTNLNSELTQEEIEQISNLKGYTGTHNLSLKAINLILDELWHTNDNQIAIFNRLKLVPKK |
| | VDLSQQKEIPTTLVDDFILSPVVKRSFIQSIKVINAIIKKYGLPNDIIIELAREKNSKDAQKMI |
| | NEMQKRNRQTNERIEEIIRTTGKENAKYLIEKIKLHDMQEGKCLYSLEAIPLEDLLNNPEN |
| | YEVDHIIPRSVSFDNSFNNKVLVKQEENSKKGNRTPFQYLSSSDSKISYETFKKHILNLAKG |
| | KGRISKTKKEYLLEERDINRFSVQKDFINRNLVDTRYATRGLMNLLRSYFRVNNLDVKVK |
| | SINGGFTSFLRRKWKFKKERNKGYKHHAEDALIIANADFIFKEWKKLDKAKKVMENQMF |
| | EEKQAESMPEIETEQEYKEIFITPHQIKHIKDFKDYKYSHRVDKKPNRELINDTLYSTRKDD |
| | KGNTLIVNNLNGLYDKDNDKLKKLINKSPEKLLMYHHDPQTYQKLKLIMEQYGDEKNPL |
| | YKYYEETGNYLTKYSKKDNGPVIKKIKYYGNKLNAHLDITDDYPNSRNKVVKLSLKPYR |
| | FDVYLDNGVYKFVTVKNLDVIKKENYYEVNSKCYEEAKKLKKISNQAEFIASFYNNDLIK |
| | INGELYRVIGVNNDLLNRIEVNMIDITYREYLENMNDKRPPRIIKTIASKTQSIKKYSTDILG |
| | NLYEVKSKKHPQIIKKG (SEQ ID NO: 76) |
| Geobacillus | MKYKIGLDIGITSIGWAVINLDIPRIEDLGVRIFDRAENPKTGESLALPRRLARSARRRLRRR |
| thermodenitrificans | KHRLERIRRLFVREGILTKEELNKLFEKKHEIDVWQLRVEALDRKLNNDELARILLHLAKR |
| Cas9 | RGFRSNRKSERTNKENSTMLKHIEENQSILSSYRTVAEMVVKDPKFSLHKRNKEDNYTNT |
| | VARDDLEREIKLIFAKQREYGNIVCTEAFEHEYISIWASQRPFASKDDIEKKVGFCTFEPKE |
| | KRAPKATYTFQSFTVWEHINKLRLVSPGGIRALTDDERRLIYKQAFHKNKITFHDVRTLLN |
| | LPDDTRFKGLLYDRNTTLKENEKVRFLELGAYHKIRKAIDSVYGKGAAKSFRPIDFDTFG |
| | YALTMFKDDTDIRSYLRNEYEQNGKRMENLADKVYDEELIEELLNLSFSKFGHLSLKALR |
| | NILPYMEQGEVYSTACERAGYTFTGPKKKQKTVLLPNIPPIANPVVMRALTQARKVVNAII |
| | KKYGSPVSIHIELARELSQSFDERRKMQKEQEGNRKKNETAIRQLVEYGLTLNPTGLDIVK |
| | FKLWSEQNGKCAYSLQPIEIERLLEPGYTEVDHVIPYSRSLDDSYTNKVLVLTKENREKGN |
| | RTPAEYLGLGSERWQQFETFVLTNKQFSKKKRDRLLRLHYDENEENEFKNRNLNDTRYIS |
| | RFLANFIREHLKFADSDDKQKVYTVNGRITAHLRSRWNFNKNREESNLHHAVDAAIVAC |
| | TTPSDIARVTAFYQRREQNKELSKKTDPQFPQPWPHFADELQARLSKNPKESIKALNLGN |
| | YDNEKLESLQPVFVSRMPKRSITGAAHQETLRRYIGIDERSGKIQTVVKKKLSEIQLDKTG |
| | HFPMYGKESDPRTYEAIRQRLLEHNNDPKKAFQEPLYKPKKNGELGPIIRTIKIIDTTNQVIP |
| | LNDGKTVAYNSNIVRVDVFEKDGKYYCVPIYTIDMMKGILPNKAIEPNKPYSEWKEMTE |
| | DYTFRFSLYPNDLIRIEFPREKTIKTAVGEEIKIKDLFAYYQTIDSSNGGLSLVSHDNNFSLR |
| | SIGSRTLKRFEKYQVDVLGNIYKVRGEKRVGVASSSHSKAGETIRPL (SEQ ID NO: 77) |
| ScCas9 | MEKKYSIGLDIGTNSVGWAVITDDYKVPSKKFKVLGNTNRKSIKKNLMGALLFDSGETAE |
| S. canis | ATRLKRTARRRYTRRKNRIRYLQEIFANEMAKLDDSFFQRLEESFLVEEDKKNERHPIFGN |
| 1375 AA | LADEVAYHRNYPTIYHLRKKLADSPEKADLRLIYLALAHIIKFRGHFLIEGKLNAENSDVA |
| 159.2 kDa | KLFYQLIQTYNQLFEESPLDEIEVDAKGILSARLSKSKRLEKLIAVFPNEKKNGLFGNIIALA |
| | LGLTPNFKSNFDLTEDAKLQLSKDTYDDDLDELLGQIGDQYADLFSAAKNLSDAILLSDIL |
| | RSNSEVTKAPLSASMVKRYDEHHQDLALLKTLVRQQFPEKYAEIFKDDTKNGYAGYVGI |
| | GIKHRKRTTKLATQEEFYKFIKPILEKMDGAEELLAKLNRDDLLRKQRTFDNGSIPHQIHL |
| | KELHAILRRQEEFYPFLKENREKIEKILTFRIPYYVGPLARGNSRFAWLTRKSEEAITPWNF |
| | EEVVDKGASAQSFIERMTNFDEQLPNKKVLPKHSLLYEYFTVYNELTKVKYVTERMRKP |
| | EFLSGEQKKAIVDLLFKTNRKVTVKQLKEDYFKKIECFDSVEIIGVEDRFNASLGTYHDLL |
| | KIIKDKDFLDNEENEDILEDIVLTLTLFEDREMIEERLKTYAHLFDDKVMKQLKRRHYTG |
| | WGRLSRKMINGIRDKQSGKTILDFLKSDGFSNRNFMQLIHDDSLTFKEEIEKAQVSGQGDS |
| | LHEQIADLAGSPAIKKGILQTVKIVDELVKVMGHKPENIVIEMARENQTTTKGLQQSRERK |
| | KRIEEGIKELESQILKENPVENTQLQNEKLYLYYLQNGRDMYVDQELDINRLSDYDVDHI |
| | VPQSFIKDDSIDNKVLTRSVENRGKSDNVPSEEVVKKMKNYWRQLLNAKLITQRKFDNLT |
| | KAERGGLSEADKAGFIKRQLVETRQITKHVARILDSRMNTKRDKNDKPIREVKVITLKSKL |
| | VSDFRKDFQLYKVRDINNYHHAHDAYLNAVVGTALIKKYPKLESEFVYGDYKVYDVRK |
| | MIAKSEQEIGKATAKRFFYSNIMNFFKTEVKLANGEIRKRPLIETNGETGEVVWNKEKDFA |
| | TVRKVLAMPQVNIVKKTEVQTGGFSKESILSKRESAKLIPRKKGWDTRKYGGFGSPTVAY |
| | SILVVAKVEKGKAKKLKSVKVLVGITIMEKGSYEKDPIGFLEAKGYKDIKKELIFKLPKYS |
| | LFELENGRRRMLASATELQKANELVLPQHLVRLLYYTQNISATTGSNNLGYIEQHREEFK |
| | EIFEKIIDFSEKYILKNKVNSNLKSSFDEQFAVSDSILLSNSFVSLLKYTSFGASGGFTFLDLD |
| | VKQGRLRYQTVTEVLDATLIYQSITGLYETRTDLSQLGGD (SEQ ID NO: 78) |

[0292] The base editors described herein may include any of the above Cas9 ortholog sequences, or any variants thereof having at least 80%, at least 85%, at least 90%, at least 95%, or at least 99% sequence identity thereto.

[0293] The napDNAbp may include any suitable homologs and/or orthologs or naturally occurring enzymes, such as, Cas9. Cas9 homologs and/or orthologs have been described in various species, including, but not limited to, S. pyogenes and S. thermophilus. Preferably, the Cas moiety is configured (e.g, mutagenized, recombinantly engineered, or otherwise obtained from nature) as a nickase, i.e., capable of cleaving only a single strand of the target double strand DNA. Suitable Cas9 nucleases (including nickase variants and nuclease inactive variants) and sequences will be apparent to those of skill in the art based on this disclosure, and such Cas9 nucleases and sequences include Cas9 sequences from the organisms and loci disclosed in Chylinski, Rhun, and Charpentier, “The tracrRNA and Cas9 families of type II CRISPR-Cas immunity systems” (2013) RNA Biology 10:5, 726-737; the entire contents of which are incorporated herein by reference. In some embodiments, a Cas9 nuclease has an inactive (e.g., an inactivated) DNA cleavage domain, that is, the Cas9 is a nickase. In some embodiments, the Cas9 protein comprises an amino acid sequence that is at least 80% identical to the amino acid sequence of a Cas9 protein as provided by any one of the variants of Table 3. In some embodiments, the Cas9 protein comprises an amino acid sequence that is at least 85%, at least 90%, at least 92%, at least 95%, at least 96%, at least 97%, at least 98%, at least 99%, or at least 99.5% identical to the amino acid sequence of a Cas9 protein as provided by any one of the Cas9 orthologs in the above tables.

### (3) Dead Cas9 Variant

[0294] In certain embodiments, the base editors described herein may include a dead Cas9, e.g., dead SpCas9, which has no nuclease activity due to one or more mutations that inactive both nuclease domains of Cas9, namely the RuvC domain (which cleaves the non-protospacer DNA strand) and HNH domain (which cleaves the protospacer DNA strand). The nuclease inactivation may be due to one or mutations that result in one or more substitutions and/or deletions in the amino acid sequence of the encoded protein, or any variants thereof having at least 80%, at least 85%, at least 90%, at least 95%, or at least 99% sequence identity thereto.

[0295] As used herein, the term “dCas9” refers to a nuclease-inactive Cas9 or nuclease-dead Cas9, or a functional fragment thereof, and embraces any naturally occurring dCas9 from any organism, any naturally-occurring dCas9 equivalent or functional fragment thereof, any dCas9 homolog, ortholog, or paralog from any organism, and any mutant or variant of a dCas9, naturally-occurring or engineered. The term dCas9 is not meant to be particularly limiting and may be referred to as a “dCas9 or equivalent.” Exemplary dCas9 proteins and method for making dCas9 proteins are further described herein and/or are described in the art and are incorporated herein by reference.

[0296] In other embodiments, dCas9 corresponds to, or comprises in part or in whole, a Cas9 amino acid sequence having one or more mutations that inactivate the Cas9 nuclease activity. In other embodiments, Cas9 variants having mutations other than D10A and H840A are provided which may result in the full or partial inactivate of the endogenous Cas9 nuclease activity (e.g., nCas9 or dCas9, respectively). Such mutations, by way of example, include other amino acid substitutions at D10 and H820, or other substitutions within the nuclease domains of Cas9 (e.g., substitutions in the HNH nuclease subdomain and/or the RuvC1 subdomain) with reference to a wild type sequence such as Cas9 from Streptococcus pyogenes (NCBI Reference Sequence: NC_017053.1). In some embodiments, variants or homologues of Cas9 (e.g., variants of Cas9 from Streptococcus pyogenes (NCBI Reference Sequence: NC_017053.1)) are provided which are at least about 70% identical, at least about 80% identical, at least about 90% identical, at least about 95% identical, at least about 98% identical, at least about 99% identical, at least about 99.5% identical, or at least about 99.9% identical to NCBI Reference Sequence: NC_017053.1. In some embodiments, variants of dCas9 (e.g., variants of NCBI Reference Sequence: NC_017053.1) are provided having amino acid sequences which are shorter, or longer than NC_017053.1 by about 5 amino acids, by about 10 amino acids, by about 15 amino acids, by about 20 amino acids, by about 25 amino acids, by about 30 amino acids, by about 40 amino acids, by about 50 amino acids, by about 75 amino acids, by about 100 amino acids or more.

[0297] In one embodiment, the dead Cas9 may be based on the canonical SpCas9 sequence of Q99ZW2 and may have the following sequence, which comprises a D10A and an H810A substitutions (underlined and bolded), or a variant be variant of SEQ ID NO: 79 having at least 80%, at least 85%, at least 90%, at least 95%, or at least 99% sequence identity thereto:

| | | SEQ |
|---|---|---|
| | | ID |
| Description | Sequence | NO: |
| dead Cas9 or | MDKKYSIGLXIGTNSVGWAVITDEYKVPSKKFKVLGNTDRHSIKKNLIGALL | 79 |
| dCas9 | FDSGETAEATRLKRTARRRYTRRKNRICYLQEIFSNEMAKVDDSFFHRLEESF | |
| Streptococcus | LVEEDKKHERHPIFGNIVDEVAYHEKYPTIYHLRKKLVDSTDKADLRLIYLAL | |
| pyogenes | AHMIKFRGHFLIEGDLNPDNSDVDKLFIQLVQTYNQLFEENPINASGVDAKAI | |
| Q99ZW2 Cas9 | LSARLSKSRRLENLIAQLPGEKKNGLFGNLIALSLGLTPNFKSNFDLAEDAKL | |
| with D10X | QLSKDTYDDDLDNLLAQIGDQYADLFLAAKNLSDAILLSDILRVNTEITKAPL | |
| and | SASMIKRYDEHHQDLTLLKALVRQQLPEKYKEIFFDQSKNGYAGYIDGGASQE | |
| H810X | EFYKFIKPILEKMDGTEELLVKLNREDLLRKQRTFDNGSIPHQIHLGELHAIL | |
| Where | RRQEDFYPFLKDNREKIEKILTFRIPYYVGPLARGNSRFAWMTRKSEETITPW | |
| “X” is | NFEEVVDKGASAQSFIERMTNFDKNLPNEKVLPKHSLLYEYFTVYNELTKVKY | |
| any amino | VTEGMRKPAFLSGEQKKAIVDLLFKTNRKVTVKQLKEDYFKKIECFDSVEISG | |
| acid | VEDRFNASLGTYHDLLKIIKDKDFLDNEENEDILEDIVLTLTLFEDREMIEER | |
| | LKTYAHLFDDKVMKQLKRRRYTGWGRLSRKLINGIRDKQSGKTILDFLKSDGF | |
| | ANRNFMQLIHDDSLTFKEDIQKAQVSGQGDSLHEHIANLAGSPAIKKGILQTV | |
| | KVVDELVKVMGRHKPENIVIEMARENQTTQKGQKNSRERMKRIEEGIKELGS | |
| | QILKEHPVENTQLQNEKLYLYYLQNGRDMYVDQELDINRLSDYDVDX | |
| | IVPQSFLKDDSIDNKVLTRSDKNRGKSDNVPSEEVVKKMKNYWRQLLNAKL | |
| | ITQRKFDNLTKAERGGLSELDKAGFIKRQLVETRQITKHVAQILDSRMNTKY | |
| | DENDKLIREVKVITLKSKLVSDFRKDFQFYKVREINNYHHAHDAYLNAVVG | |
| | TALIKKYPKLESEFVYGDYKVYDVRKMIAKSEQEIGKATAKYFFYSNIMNFF | |
| | KTEITLANGEIRKRPLIETNGETGEIVWDKGRDFATVRKVLSMPQVNIVKKTE | |
| | VQTGGFSKESILPKRNSDKLIARKKDWDPKKYGGFDSPTVAYSVLVVAKVEK | |
| | GKSKKLKSVKELLGITIMERSSFEKNPIDFLEAKGYKEVKKDLIIKLPKYSLF | |
| | ELENGRKRMLASAGELQKGNELALPSKYVNFLYLASHYEKLKGSPEDNEQKQ | |
| | LFVEQHKHYLDEIIEQISEFSKRVILADANLDKVLSAYNKHRDKPIREQAENI | |
| | IHLFTLTNLGAPAAFKYFDTTIDRKRYTSTKEVLDATLIHQSITGLYETRIDL | |
| | SQLGGD | |
| dead Cas9 or | MDKKYSIGLAIGTNSVGWAVITDEYKVPSKKFKVLGNTDRHSIKKNLIGALL | 80 |
| dCas9 | FDSGETAEATRLKRTARRRYTRRKNRICYLQEIFSNEMAKVDDSFFHRLEESF | |
| Streptococcus | LVEEDKKHERHPIFGNIVDEVAYHEKYPTIYHLRKKLVDSTDKADLRLIYLAL | |
| pyogenes | AHMIKFRGHFLIEGDLNPDNSDVDKLFIQLVQTYNQLFEENPINASGVDAKAI | |
| Q99ZW2 Cas9 | LSARLSKSRRLENLIAQLPGEKKNGLFGNLIALSLGLTPNFKSNFDLAEDAKL | |
| with D10A | QLSKDTYDDDLDNLLAQIGDQYADLFLAAKNLSDAILLSDILRVNTEITKAPL | |
| and | SASMIKRYDEHHQDLTLLKALVRQQLPEKYKEIFFDQSKNGYAGYIDGGASQE | |
| H810A | EFYKFIKPILEKMDGTEELLVKLNREDLLRKQRTFDNGSIPHQIHLGELHAIL | |
| | RRQEDFYPFLKDNREKIEKILTFRIPYYVGPLARGNSRFAWMTRKSEETITPW | |
| | NFEEVVDKGASAQSFIERMTNFDKNLPNEKVLPKHSLLYEYFTVYNELTKVKY | |
| | VTEGMRKPAFLSGEQKKAIVDLLFKTNRKVTVKQLKEDYFKKIECFDSVEISG | |
| | VEDRFNASLGTYHDLLKIIKDKDFLDNEENEDILEDIVLTLTLFEDREMIEER | |
| | LKTYAHLFDDKVMKQLKRRRYTGWGRLSRKLINGIRDKQSGKTILDFLKSDGF | |
| | ANRNFMQLIHDDSLTFKEDIQKAQVSGQGDSLHEHIANLAGSPAIKKGIL | |
| | QTVKVVDELVKVMGRHKPENIVIEMARENQTTQKGQKNSRERMKRIEEGIK | |
| | ELGSQILKEHPVENTQLQNEKLYLYYLQNGRDMYVDQELDINRLSDYDVDA | |
| | IVPQSFLKDDSIDNKVLTRSDKNRGKSDNVPSEEVVKKMKNYWRQLLNAKL | |
| | ITQRKFDNLTKAERGGLSELDKAGFIKRQLVETRQITKHVAQILDSRMNTKY | |
| | DENDKLIREVKVITLKSKLVSDFRKDFQFYKVREINNYHHAHDAYLNAVVG | |
| | TALIKKYPKLESEFVYGDYKVYDVRKMIAKSEQEIGKATAKYFFYSNIMNFF | |
| | KTEITLANGEIRKRPLIETNGETGEIVWDKGRDFATVRKVLSMPQVNIVKKTE | |
| | VQTGGFSKESILPKRNSDKLIARKKDWDPKKYGGFDSPTVAYSVLVVAKVEK | |
| | GKSKKLKSVKELLGITIMERSSFEKNPIDFLEAKGYKEVKKDLIIKLPKYSLF | |
| | ELENGRKRMLASAGELQKGNELALPSKYVNFLYLASHYEKLKGSPEDNEQKQ | |
| | LFVEQHKHYLDEIIEQISEFSKRVILADANLDKVLSAYNKHRDKPIREQAENI | |
| | IHLFTLTNLGAPAAFKYFDTTIDRKRYTSTKEVLDATLIHQSITGLYETRID | |
| | LSQLGGD | |

### (4) Cas9 Nickase Variant

[0298] In one embodiment, the base editors described herein comprise a Cas9 nickase. The term “Cas9 nickase” of “nCas9” refers to a variant of Cas9 which is capable of introducing a single-strand break in a double strand DNA molecule target. In some embodiments, the Cas9 nickase comprises only a single functioning nuclease domain. The wild type Cas9 (e.g., the canonical SpCas9) comprises two separate nuclease domains, namely, the RuvC domain (which cleaves the non-protospacer DNA strand) and HNH domain (which cleaves the protospacer DNA strand). In one embodiment, the Cas9 nickase comprises a mutation in the RuvC domain which inactivates the RuvC nuclease activity. For example, mutations in aspartate (D) 10, histidine (H) 983, aspartate (D) 986, or glutamate (E) 762, have been reported as loss-of-function mutations of the RuvC nuclease domain and the creation of a functional Cas9 nickase (e.g., Nishimasu et al., “Crystal structure of Cas9 in complex with guide RNA and target DNA,” Cell 156(5), 935-949, which is incorporated herein by reference). Thus, nickase mutations in the RuvC domain could include D10X, H983X, D986X, or E762X, wherein X is any amino acid other than the wild type amino acid. In certain embodiments, the nickase could be D10A, of H983A, or D986A, or E762A, or a combination thereof.

[0299] In various embodiments, the Cas9 nickase can having a mutation in the RuvC nuclease domain and have one of the following amino acid sequences, or a variant thereof having an amino acid sequence that has at least 80%, at least 85%, at least 90%, at least 95%, or at least 99% sequence identity thereto.

| | | SEQ |
|---|---|---|
| | | ID |
| Description | Sequence | NO: |
| Cas9 nickase | MDKKYSIGLXIGTNSVGWAVITDEYKVPSKKFKVLGNTDRHSIKKNLIGALL | 81 |
| Streptococcus | FDSGETAEATRLKRTARRRYTRRKNRICYLQEIFSNEMAKVDDSFFHRLEESF | |
| pyogenes | LVEEDKKHERHPIFGNIVDEVAYHEKYPTIYHLRKKLVDSTDKADLRLIYLAL | |
| Q99ZW2 Cas9 | AHMIKFRGHFLIEGDLNPDNSDVDKLFIQLVQTYNQLFEENPINASGVDAKAI | |
| with D10X, | LSARLSKSRRLENLIAQLPGEKKNGLFGNLIALSLGLTPNFKSNFDLAEDAKL | |
| wherein X is | QLSKDTYDDDLDNLLAQIGDQYADLFLAAKNLSDAILLSDILRVNTEITKAPL | |
| any alternate | SASMIKRYDEHHQDLTLLKALVRQQLPEKYKEIFFDQSKNGYAGYIDGGASQ | |
| amino acid | EEFYKFIKPILEKMDGTEELLVKLNREDLLRKQRTFDNGSIPHQIHLGELHAIL | |
| | RRQEDFYPFLKDNREKIEKILTFRIPYYVGPLARGNSRFAWMTRKSEETITPW | |
| | NFEEVVDKGASAQSFIERMTNFDKNLPNEKVLPKHSLLYEYFTVYNELTKVK | |
| | YVTEGMRKPAFLSGEQKKAIVDLLFKTNRKVTVKQLKEDYFKKIECFDSVEI | |
| | SGVEDRFNASLGTYHDLLKIIKDKDFLDNEENEDILEDIVLTLTLFEDREMIEE | |
| | RLKTYAHLFDDKVMKQLKRRRYTGWGRLSRKLINGIRDKQSGKTILDFLKS | |
| | DGFANRNFMQLIHDDSLTFKEDIQKAQVSGQGDSLHEHIANLAGSPAIKKGIL | |
| | QTVKVVDELVKVMGRHKPENIVIEMARENQTTQKGQKNSRERMKRIEEGIK | |
| | ELGSQILKEHPVENTQLQNEKLYLYYLQNGRDMYVDQELDINRLSDYDVDH | |
| | IVPQSFLKDDSIDNKVLTRSDKNRGKSDNVPSEEVVKKMKNYWRQLLNAKL | |
| | ITQRKFDNLTKAERGGLSELDKAGFIKRQLVETRQITKHVAQILDSRMNTKY | |
| | DENDKLIREVKVITLKSKLVSDFRKDFQFYKVREINNYHHAHDAYLNAVVG | |
| | TALIKKYPKLESEFVYGDYKVYDVRKMIAKSEQEIGKATAKYFFYSNIMNFF | |
| | KTEITLANGEIRKRPLIETNGETGEIVWDKGRDFATVRKVLSMPQVNIVKKTE | |
| | VQTGGFSKESILPKRNSDKLIARKKDWDPKKYGGFDSPTVAYSVLVVAKVE | |
| | KGKSKKLKSVKELLGITIMERSSFEKNPIDFLEAKGYKEVKKDLIIKLPKYSLF | |
| | ELENGRKRMLASAGELQKGNELALPSKYVNFLYLASHYEKLKGSPEDNEQK | |
| | QLFVEQHKHYLDEIIEQISEFSKRVILADANLDKVLSAYNKHRDKPIREQAENI | |
| | IHLFTLTNLGAPAAFKYFDTTIDRKRYTSTKEVLDATLIHQSITGLYETRIDLS | |
| | QLGGD | |
| Cas9 nickase | MDKKYSIGLDIGTNSVGWAVITDEYKVPSKKFKVLGNTDRHSIKKNLIGALL | 82 |
| Streptococcus | FDSGETAEATRLKRTARRRYTRRKNRICYLQEIFSNEMAKVDDSFFHRLEESF | |
| pyogenes | LVEEDKKHERHPIFGNIVDEVAYHEKYPTIYHLRKKLVDSTDKADLRLIYLAL | |
| Q99ZW2 Cas9 | AHMIKFRGHFLIEGDLNPDNSDVDKLFIQLVQTYNQLFEENPINASGVDAKAI | |
| with E762X, | LSARLSKSRRLENLIAQLPGEKKNGLFGNLIALSLGLTPNFKSNFDLAEDAKL | |
| wherein X is | QLSKDTYDDDLDNLLAQIGDQYADLFLAAKNLSDAILLSDILRVNTEITKAPL | |
| any alternate | SASMIKRYDEHHQDLTLLKALVRQQLPEKYKEIFFDQSKNGYAGYIDGGASQE | |
| amino acid | EFYKFIKPILEKMDGTEELLVKLNREDLLRKQRTFDNGSIPHQIHLGELHAIL | |
| | RRQEDFYPFLKDNREKIEKILTFRIPYYVGPLARGNSRFAWMTRKSEETITPW | |
| | NFEEVVDKGASAQSFIERMTNFDKNLPNEKVLPKHSLLYEYFTVYNELTKVK | |
| | YVTEGMRKPAFLSGEQKKAIVDLLFKTNRKVTVKQLKEDYFKKIECFDSVEI | |
| | SGVEDRFNASLGTYHDLLKIIKDKDFLDNEENEDILEDIVLTLTLFEDREMIE | |
| | ERLKTYAHLFDDKVMKQLKRRRYTGWGRLSRKLINGIRDKQSGKTILDFLKS | |
| | DGFANRNFMQLIHDDSLTFKEDIQKAQVSGQGDSLHEHIANLAGSPAIKKGI | |
| | LQTVKVVDELVKVMGRHKPENIVIXMARENQTTQKGQKNSRERMKRIEEGIK | |
| | ELGSQILKEHPVENTQLQNEKLYLYYLQNGRDMYVDQELDINRLSDYDVDH | |
| | IVPQSFLKDDSIDNKVLTRSDKNRGKSDNVPSEEVVKKMKNYWRQLLNAKL | |
| | ITQRKFDNLTKAERGGLSELDKAGFIKRQLVETRQITKHVAQILDSRMNTKY | |
| | DENDKLIREVKVITLKSKLVSDFRKDFQFYKVREINNYHHAHDAYLNAVVG | |
| | TALIKKYPKLESEFVYGDYKVYDVRKMIAKSEQEIGKATAKYFFYSNIMNFF | |
| | KTEITLANGEIRKRPLIETNGETGEIVWDKGRDFATVRKVLSMPQVNIVKKTE | |
| | VQTGGFSKESILPKRNSDKLIARKKDWDPKKYGGFDSPTVAYSVLVVAKVEK | |
| | GKSKKLKSVKELLGITIMERSSFEKNPIDFLEAKGYKEVKKDLIIKLPKYSL | |
| | FELENGRKRMLASAGELQKGNELALPSKYVNFLYLASHYEKLKGSPEDNEQK | |
| | QLFVEQHKHYLDEIIEQISEFSKRVILADANLDKVLSAYNKHRDKPIREQAE | |
| | NIIHLFTLTNLGAPAAFKYFDTTIDRKRYTSTKEVLDATLIHQSITGLYETR | |
| | IDLSQLGGD | |
| Cas9 nickase | MDKKYSIGLDIGTNSVGWAVITDEYKVPSKKFKVLGNTDRHSIKKNLIGALL | 83 |
| Streptococcus | FDSGETAEATRLKRTARRRYTRRKNRICYLQEIFSNEMAKVDDSFFHRLEESF | |
| pyogenes | LVEEDKKHERHPIFGNIVDEVAYHEKYPTIYHLRKKLVDSTDKADLRLIYLAL | |
| Q99ZW2 Cas9 | AHMIKFRGHFLIEGDLNPDNSDVDKLFIQLVQTYNQLFEENPINASGVDAKAI | |
| with H983X, | LSARLSKSRRLENLIAQLPGEKKNGLFGNLIALSLGLTPNFKSNFDLAEDAKL | |
| wherein X is | QLSKDTYDDDLDNLLAQIGDQYADLFLAAKNLSDAILLSDILRVNTEITKAPL | |
| any alternate | SASMIKRYDEHHQDLTLLKALVRQQLPEKYKEIFFDQSKNGYAGYIDGGASQE | |
| amino acid | EFYKFIKPILEKMDGTEELLVKLNREDLLRKQRTFDNGSIPHQIHLGELHAIL | |
| | RRQEDFYPFLKDNREKIEKILTFRIPYYVGPLARGNSRFAWMTRKSEETITPW | |
| | NFEEVVDKGASAQSFIERMTNFDKNLPNEKVLPKHSLLYEYFTVYNELTKVKY | |
| | VTEGMRKPAFLSGEQKKAIVDLLFKTNRKVTVKQLKEDYFKKIECFDSVEISG | |
| | VEDRFNASLGTYHDLLKIIKDKDFLDNEENEDILEDIVLTLTLFEDREMIEE | |
| | RLKTYAHLFDDKVMKQLKRRRYTGWGRLSRKLINGIRDKQSGKTILDFLKS | |
| | DGFANRNFMQLIHDDSLTFKEDIQKAQVSGQGDSLHEHIANLAGSPAIKKGIL | |
| | QTVKVVDELVKVMGRHKPENIVIEMARENQTTQKGQKNSRERMKRIEEGIK | |
| | ELGSQILKEHPVENTQLQNEKLYLYYLQNGRDMYVDQELDINRLSDYDVDH | |
| | IVPQSFLKDDSIDNKVLTRSDKNRGKSDNVPSEEVVKKMKNYWRQLLNAKL | |
| | ITQRKFDNLTKAERGGLSELDKAGFIKRQLVETRQITKHVAQILDSRMNTKY | |
| | DENDKLIREVKVITLKSKLVSDFRKDFQFYKVREINNYHXAHDAYLNAVVG | |
| | TALIKKYPKLESEFVYGDYKVYDVRKMIAKSEQEIGKATAKYFFYSNIMNFF | |
| | KTEITLANGEIRKRPLIETNGETGEIVWDKGRDFATVRKVLSMPQVNIVKKT | |
| | EVQTGGFSKESILPKRNSDKLIARKKDWDPKKYGGFDSPTVAYSVLVVAKVE | |
| | KGKSKKLKSVKELLGITIMERSSFEKNPIDFLEAKGYKEVKKDLIIKLPKYSL | |
| | FELENGRKRMLASAGELQKGNELALPSKYVNFLYLASHYEKLKGSPEDNEQK | |
| | QLFVEQHKHYLDEIIEQISEFSKRVILADANLDKVLSAYNKHRDKPIREQAENI | |
| | IHLFTLTNLGAPAAFKYFDTTIDRKRYTSTKEVLDATLIHQSITGLYETRIDLS | |
| | QLGGD | |
| Cas9 nickase | MDKKYSIGLDIGTNSVGWAVITDEYKVPSKKFKVLGNTDRHSIKKNLIGALL | 84 |
| Streptococcus | FDSGETAEATRLKRTARRRYTRRKNRICYLQEIFSNEMAKVDDSFFHRLEESF | |
| pyogenes | LVEEDKKHERHPIFGNIVDEVAYHEKYPTIYHLRKKLVDSTDKADLRLIYLAL | |
| Q99ZW2 Cas9 | AHMIKFRGHFLIEGDLNPDNSDVDKLFIQLVQTYNQLFEENPINASGVDAKAI | |
| with D986X, | LSARLSKSRRLENLIAQLPGEKKNGLFGNLIALSLGLTPNFKSNFDLAEDAKL | |
| wherein X is | QLSKDTYDDDLDNLLAQIGDQYADLFLAAKNLSDAILLSDILRVNTEITKAPL | |
| any alternate | SASMIKRYDEHHQDLTLLKALVRQQLPEKYKEIFFDQSKNGYAGYIDGGASQ | |
| amino acid | EEFYKFIKPILEKMDGTEELLVKLNREDLLRKQRTFDNGSIPHQIHLGELHAIL | |
| | RRQEDFYPFLKDNREKIEKILTFRIPYYVGPLARGNSRFAWMTRKSEETITPW | |
| | NFEEVVDKGASAQSFIERMTNFDKNLPNEKVLPKHSLLYEYFTVYNELTKVK | |
| | YVTEGMRKPAFLSGEQKKAIVDLLFKTNRKVTVKQLKEDYFKKIECFDSVEI | |
| | SGVEDRFNASLGTYHDLLKIIKDKDFLDNEENEDILEDIVLTLTLFEDREMIEE | |
| | RLKTYAHLFDDKVMKQLKRRRYTGWGRLSRKLINGIRDKQSGKTILDFLKS | |
| | DGFANRNFMQLIHDDSLTFKEDIQKAQVSGQGDSLHEHIANLAGSPAIKKGIL | |
| | QTVKVVDELVKVMGRHKPENIVIEMARENQTTQKGQKNSRERMKRIEEGIK | |
| | ELGSQILKEHPVENTQLQNEKLYLYYLQNGRDMYVDQELDINRLSDYDVDH | |
| | IVPQSFLKDDSIDNKVLTRSDKNRGKSDNVPSEEVVKKMKNYWRQLLNAKL | |
| | ITQRKFDNLTKAERGGLSELDKAGFIKRQLVETRQITKHVAQILDSRMNTKY | |
| | DENDKLIREVKVITLKSKLVSDFRKDFQFYKVREINNYHHAHXAYLNAVVG | |
| | TALIKKYPKLESEFVYGDYKVYDVRKMIAKSEQEIGKATAKYFFYSNIMNFF | |
| | KTEITLANGEIRKRPLIETNGETGEIVWDKGRDFATVRKVLSMPQVNIVKKTE | |
| | VQTGGFSKESILPKRNSDKLIARKKDWDPKKYGGFDSPTVAYSVLVVAKVEK | |
| | GKSKKLKSVKELLGITIMERSSFEKNPIDFLEAKGYKEVKKDLIIKLPKYSL | |
| | FELENGRKRMLASAGELQKGNELALPSKYVNFLYLASHYEKLKGSPEDNEQK | |
| | QLFVEQHKHYLDEIIEQISEFSKRVILADANLDKVLSAYNKHRDKPIREQAE | |
| | NIIHLFTLTNLGAPAAFKYFDTTIDRKRYTSTKEVLDATLIHQSITGLYETR | |
| | IDLSQLGGD | |
| Cas9 nickase | MDKKYSIGLAIGTNSVGWAVITDEYKVPSKKFKVLGNTDRHSIKKNLIGALL | 85 |
| Streptococcus | FDSGETAEATRLKRTARRRYTRRKNRICYLQEIFSNEMAKVDDSFFHRLEESF | |
| pyogenes | LVEEDKKHERHPIFGNIVDEVAYHEKYPTIYHLRKKLVDSTDKADLRLIYLAL | |
| Q99ZW2 Cas9 | AHMIKFRGHFLIEGDLNPDNSDVDKLFIQLVQTYNQLFEENPINASGVDAKAI | |
| with D10A | LSARLSKSRRLENLIAQLPGEKKNGLFGNLIALSLGLTPNFKSNFDLAEDAKL | |
| | QLSKDTYDDDLDNLLAQIGDQYADLFLAAKNLSDAILLSDILRVNTEITKAPL | |
| | SASMIKRYDEHHQDLTLLKALVRQQLPEKYKEIFFDQSKNGYAGYIDGGASQE | |
| | EFYKFIKPILEKMDGTEELLVKLNREDLLRKQRTFDNGSIPHQIHLGELHAIL | |
| | RRQEDFYPFLKDNREKIEKILTFRIPYYVGPLARGNSRFAWMTRKSEETITPW | |
| | NFEEVVDKGASAQSFIERMTNFDKNLPNEKVLPKHSLLYEYFTVYNELTKVKY | |
| | VTEGMRKPAFLSGEQKKAIVDLLFKTNRKVTVKQLKEDYFKKIECFDSVEISG | |
| | VEDRFNASLGTYHDLLKIIKDKDFLDNEENEDILEDIVLTLTLFEDREMIEE | |
| | RLKTYAHLFDDKVMKQLKRRRYTGWGRLSRKLINGIRDKQSGKTILDFLKSD | |
| | GFANRNFMQLIHDDSLTFKEDIQKAQVSGQGDSLHEHIANLAGSPAIKKGIL | |
| | QTVKVVDELVKVMGRHKPENIVIEMARENQTTQKGQKNSRERMKRIEEGIK | |
| | ELGSQILKEHPVENTQLQNEKLYLYYLQNGRDMYVDQELDINRLSDYDVDH | |
| | IVPQSFLKDDSIDNKVLTRSDKNRGKSDNVPSEEVVKKMKNYWRQLLNAKL | |
| | ITQRKFDNLTKAERGGLSELDKAGFIKRQLVETRQITKHVAQILDSRMNTKY | |
| | DENDKLIREVKVITLKSKLVSDFRKDFQFYKVREINNYHHAHDAYLNAVVG | |
| | TALIKKYPKLESEFVYGDYKVYDVRKMIAKSEQEIGKATAKYFFYSNIMNFF | |
| | KTEITLANGEIRKRPLIETNGETGEIVWDKGRDFATVRKVLSMPQVNIVKKTE | |
| | VQTGGFSKESILPKRNSDKLIARKKDWDPKKYGGFDSPTVAYSVLVVAKVEK | |
| | GKSKKLKSVKELLGITIMERSSFEKNPIDFLEAKGYKEVKKDLIIKLPKYSL | |
| | FELENGRKRMLASAGELQKGNELALPSKYVNFLYLASHYEKLKGSPEDNEQK | |
| | QLFVEQHKHYLDEIIEQISEFSKRVILADANLDKVLSAYNKHRDKPIREQAE | |
| | NIIHLFTLTNLGAPAAFKYFDTTIDRKRYTSTKEVLDATLIHQSITGLYETR | |
| | IDLSQLGGD | |
| Cas9 nickase | MDKKYSIGLDIGTNSVGWAVITDEYKVPSKKFKVLGNTDRHSIKKNLIGALL | 86 |
| Streptococcus | FDSGETAEATRLKRTARRRYTRRKNRICYLQEIFSNEMAKVDDSFFHRLEESF | |
| pyogenes | LVEEDKKHERHPIFGNIVDEVAYHEKYPTIYHLRKKLVDSTDKADLRLIYLAL | |
| Q99ZW2 Cas9 | AHMIKFRGHFLIEGDLNPDNSDVDKLFIQLVQTYNQLFEENPINASGVDAKAI | |
| with E762A | LSARLSKSRRLENLIAQLPGEKKNGLFGNLIALSLGLTPNFKSNFDLAEDAKL | |
| | QLSKDTYDDDLDNLLAQIGDQYADLFLAAKNLSDAILLSDILRVNTEITKAPL | |
| | SASMIKRYDEHHQDLTLLKALVRQQLPEKYKEIFFDQSKNGYAGYIDGGASQ | |
| | EEFYKFIKPILEKMDGTEELLVKLNREDLLRKQRTFDNGSIPHQIHLGELHAIL | |
| | RRQEDFYPFLKDNREKIEKILTFRIPYYVGPLARGNSRFAWMTRKSEETITPW | |
| | NFEEVVDKGASAQSFIERMTNFDKNLPNEKVLPKHSLLYEYFTVYNELTKVK | |
| | YVTEGMRKPAFLSGEQKKAIVDLLFKTNRKVTVKQLKEDYFKKIECFDSVEI | |
| | SGVEDRFNASLGTYHDLLKIIKDKDFLDNEENEDILEDIVLTLTLFEDREMIE | |
| | ERLKTYAHLFDDKVMKQLKRRRYTGWGRLSRKLINGIRDKQSGKTILDFLKS | |
| | DGFANRNFMQLIHDDSLTFKEDIQKAQVSGQGDSLHEHIANLAGSPAIKKGI | |
| | LQTVKVVDELVKVMGRHKPENIVIAMARENQTTQKGQKNSRERMKRIEEGIK | |
| | ELGSQILKEHPVENTQLQNEKLYLYYLQNGRDMYVDQELDINRLSDYDVDH | |
| | IVPQSFLKDDSIDNKVLTRSDKNRGKSDNVPSEEVVKKMKNYWRQLLNAKL | |
| | ITQRKFDNLTKAERGGLSELDKAGFIKRQLVETRQITKHVAQILDSRMNTKY | |
| | DENDKLIREVKVITLKSKLVSDFRKDFQFYKVREINNYHHAHDAYLNAVVG | |
| | TALIKKYPKLESEFVYGDYKVYDVRKMIAKSEQEIGKATAKYFFYSNIMNFF | |
| | KTEITLANGEIRKRPLIETNGETGEIVWDKGRDFATVRKVLSMPQVNIVKKT | |
| | EVQTGGFSKESILPKRNSDKLIARKKDWDPKKYGGFDSPTVAYSVLVVAKVE | |
| | KGKSKKLKSVKELLGITIMERSSFEKNPIDFLEAKGYKEVKKDLIIKLPKYS | |
| | LFELENGRKRMLASAGELQKGNELALPSKYVNFLYLASHYEKLKGSPEDNEQ | |
| | KQLFVEQHKHYLDEIIEQISEFSKRVILADANLDKVLSAYNKHRDKPIREQA | |
| | ENIIHLFTLTNLGAPAAFKYFDTTIDRKRYTSTKEVLDATLIHQSITGLYET | |
| | RIDLSQLGGD | |
| Cas9 nickase | MDKKYSIGLDIGTNSVGWAVITDEYKVPSKKFKVLGNTDRHSIKKNLIGALL | 87 |
| Streptococcus | FDSGETAEATRLKRTARRRYTRRKNRICYLQEIFSNEMAKVDDSFFHRLEESF | |
| pyogenes | LVEEDKKHERHPIFGNIVDEVAYHEKYPTIYHLRKKLVDSTDKADLRLIYLAL | |
| Q99ZW2 Cas9 | AHMIKFRGHFLIEGDLNPDNSDVDKLFIQLVQTYNQLFEENPINASGVDAKAI | |
| with H983A | LSARLSKSRRLENLIAQLPGEKKNGLFGNLIALSLGLTPNFKSNFDLAEDAKL | |
| | QLSKDTYDDDLDNLLAQIGDQYADLFLAAKNLSDAILLSDILRVNTEITKAPL | |
| | SASMIKRYDEHHQDLTLLKALVRQQLPEKYKEIFFDQSKNGYAGYIDGGASQ | |
| | EEFYKFIKPILEKMDGTEELLVKLNREDLLRKQRTFDNGSIPHQIHLGELHAIL | |
| | RRQEDFYPFLKDNREKIEKILTFRIPYYVGPLARGNSRFAWMTRKSEETITPW | |
| | NFEEVVDKGASAQSFIERMTNFDKNLPNEKVLPKHSLLYEYFTVYNELTKVK | |
| | YVTEGMRKPAFLSGEQKKAIVDLLFKTNRKVTVKQLKEDYFKKIECFDSVEIS | |
| | GVEDRFNASLGTYHDLLKIIKDKDFLDNEENEDILEDIVLTLTLFEDREMIEE | |
| | RLKTYAHLFDDKVMKQLKRRRYTGWGRLSRKLINGIRDKQSGKTILDFLKSD | |
| | GFANRNFMQLIHDDSLTFKEDIQKAQVSGQGDSLHEHIANLAGSPAIKKGIL | |
| | QTVKVVDELVKVMGRHKPENIVIEMARENQTTQKGQKNSRERMKRIEEGIK | |
| | ELGSQILKEHPVENTQLQNEKLYLYYLQNGRDMYVDQELDINRLSDYDVDH | |
| | IVPQSFLKDDSIDNKVLTRSDKNRGKSDNVPSEEVVKKMKNYWRQLLNAKL | |
| | ITQRKFDNLTKAERGGLSELDKAGFIKRQLVETRQITKHVAQILDSRMNTKY | |
| | DENDKLIREVKVITLKSKLVSDFRKDFQFYKVREINNYHAAHDAYLNAVVG | |
| | TALIKKYPKLESEFVYGDYKVYDVRKMIAKSEQEIGKATAKYFFYSNIMNFF | |
| | KTEITLANGEIRKRPLIETNGETGEIVWDKGRDFATVRKVLSMPQVNIVKKT | |
| | EVQTGGFSKESILPKRNSDKLIARKKDWDPKKYGGFDSPTVAYSVLVVAKVE | |
| | KGKSKKLKSVKELLGITIMERSSFEKNPIDFLEAKGYKEVKKDLIIKLPKYSL | |
| | FELENGRKRMLASAGELQKGNELALPSKYVNFLYLASHYEKLKGSPEDNEQKQ | |
| | LFVEQHKHYLDEIIEQISEFSKRVILADANLDKVLSAYNKHRDKPIREQAENI | |
| | IHLFTLTNLGAPAAFKYFDTTIDRKRYTSTKEVLDATLIHQSITGLYETRIDL | |
| | SQLGGD | |
| Cas9 nickase | MDKKYSIGLDIGTNSVGWAVITDEYKVPSKKFKVLGNTDRHSIKKNLIGALL | 88 |
| Streptococcus | FDSGETAEATRLKRTARRRYTRRKNRICYLQEIFSNEMAKVDDSFFHRLEESF | |
| pyogenes | LVEEDKKHERHPIFGNIVDEVAYHEKYPTIYHLRKKLVDSTDKADLRLIYLAL | |
| Q99ZW2 Cas9 | AHMIKFRGHFLIEGDLNPDNSDVDKLFIQLVQTYNQLFEENPINASGVDAKAI | |
| with D986A | LSARLSKSRRLENLIAQLPGEKKNGLFGNLIALSLGLTPNFKSNFDLAEDAKL | |
| | QLSKDTYDDDLDNLLAQIGDQYADLFLAAKNLSDAILLSDILRVNTEITKAPL | |
| | SASMIKRYDEHHQDLTLLKALVRQQLPEKYKEIFFDQSKNGYAGYIDGGASQ | |
| | EEFYKFIKPILEKMDGTEELLVKLNREDLLRKQRTFDNGSIPHQIHLGELHAIL | |
| | RRQEDFYPFLKDNREKIEKILTFRIPYYVGPLARGNSRFAWMTRKSEETITPW | |
| | NFEEVVDKGASAQSFIERMTNFDKNLPNEKVLPKHSLLYEYFTVYNELTKVK | |
| | YVTEGMRKPAFLSGEQKKAIVDLLFKTNRKVTVKQLKEDYFKKIECFDSVEIS | |
| | GVEDRFNASLGTYHDLLKIIKDKDFLDNEENEDILEDIVLTLTLFEDREMIEE | |
| | RLKTYAHLFDDKVMKQLKRRRYTGWGRLSRKLINGIRDKQSGKTILDFLKSD | |
| | GFANRNFMQLIHDDSLTFKEDIQKAQVSGQGDSLHEHIANLAGSPAIKKGIL | |
| | QTVKVVDELVKVMGRHKPENIVIEMARENQTTQKGQKNSRERMKRIEEGIK | |
| | ELGSQILKEHPVENTQLQNEKLYLYYLQNGRDMYVDQELDINRLSDYDVDH | |
| | IVPQSFLKDDSIDNKVLTRSDKNRGKSDNVPSEEVVKKMKNYWRQLLNAKL | |
| | ITQRKFDNLTKAERGGLSELDKAGFIKRQLVETRQITKHVAQILDSRMNTKY | |
| | DENDKLIREVKVITLKSKLVSDFRKDFQFYKVREINNYHHAHAAYLNAVVG | |
| | TALIKKYPKLESEFVYGDYKVYDVRKMIAKSEQEIGKATAKYFFYSNIMNFF | |
| | KTEITLANGEIRKRPLIETNGETGEIVWDKGRDFATVRKVLSMPQVNIVKKTE | |
| | VQTGGFSKESILPKRNSDKLIARKKDWDPKKYGGFDSPTVAYSVLVVAKVEK | |
| | GKSKKLKSVKELLGITIMERSSFEKNPIDFLEAKGYKEVKKDLIIKLPKYSLF | |
| | ELENGRKRMLASAGELQKGNELALPSKYVNFLYLASHYEKLKGSPEDNEQK | |
| | QLFVEQHKHYLDEIIEQISEFSKRVILADANLDKVLSAYNKHRDKPIREQAENI | |
| | IHLFTLTNLGAPAAFKYFDTTIDRKRYTSTKEVLDATLIHQSITGLYETRIDLS | |
| | QLGGD | |

[0300] In another embodiment, the Cas9 nickase comprises a mutation in the HNH domain which inactivates the HNH nuclease activity. For example, mutations in histidine (H) 840 or asparagine (R) 863 have been reported as loss-of-function mutations of the HNH nuclease domain and the creation of a functional Cas9 nickase (e.g., Nishimasu et al., “Crystal structure of Cas9 in complex with guide RNA and target DNA,” Cell 156(5), 935-949, which is incorporated herein by reference). Thus, nickase mutations in the HNH domain could include H840X and R863X, wherein X is any amino acid other than the wild type amino acid. In certain embodiments, the nickase could be H840A or R863A or a combination thereof.

[0301] In various embodiments, the Cas9 nickase can have a mutation in the HNH nuclease domain and have one of the following amino acid sequences, or a variant thereof having an amino acid sequence that has at least 80%, at least 85%, at least 90%, at least 95%, or at least 99% sequence identity thereto.

| | | SEQ |
|---|---|---|
| | | ID |
| Description | Sequence | NO: |
| Cas9 nickase | MDKKYSIGLDIGTNSVGWAVITDEYKVPSKKFKVLGNTDRHSIKKNLIGALLF | 89 |
| Streptococcus | DSGETAEATRLKRTARRRYTRRKNRICYLQEIFSNEMAKVDDSFFHRLEESFLV | |
| pyogenes | EEDKKHERHPIFGNIVDEVAYHEKYPTIYHLRKKLVDSTDKADLRLIYLALAH | |
| Q99ZW2 Cas9 | MIKFRGHFLIEGDLNPDNSDVDKLFIQLVQTYNQLFEENPINASGVDAKAILSA | |
| with H840X, | RLSKSRRLENLIAQLPGEKKNGLFGNLIALSLGLTPNFKSNFDLAEDAKLQLSK | |
| wherein X is | DTYDDDLDNLLAQIGDQYADLFLAAKNLSDAILLSDILRVNTEITKAPLSASMI | |
| any alternate | KRYDEHHQDLTLLKALVRQQLPEKYKEIFFDQSKNGYAGYIDGGASQEEFYKF | |
| amino acid | IKPILEKMDGTEELLVKLNREDLLRKQRTFDNGSIPHQIHLGELHAILRRQEDFY | |
| | PFLKDNREKIEKILTFRIPYYVGPLARGNSRFAWMTRKSEETITPWNFEEVVDK | |
| | GASAQSFIERMTNFDKNLPNEKVLPKHSLLYEYFTVYNELTKVKYVTEGMRKP | |
| | AFLSGEQKKAIVDLLFKTNRKVTVKQLKEDYFKKIECFDSVEISGVEDRFNASL | |
| | GTYHDLLKIIKDKDFLDNEENEDILEDIVLTLTLFEDREMIEERLKTYAHLFDDK | |
| | VMKQLKRRRYTGWGRLSRKLINGIRDKQSGKTILDFLKSDGFANRNFMQLIHD | |
| | DSLTFKEDIQKAQVSGQGDSLHEHIANLAGSPAIKKGILQTVKVVDELVKVMG | |
| | RHKPENIVIEMARENQTTQKGQKNSRERMKRIEEGIKELGSQILKEHPVENTQL | |
| | QNEKLYLYYLQNGRDMYVDQELDINRLSDYDVDXIVPQSFLKDDSIDNKVLTR | |
| | SDKNRGKSDNVPSEEVVKKMKNYWRQLLNAKLITQRKFDNLTKAERGGLSEL | |
| | DKAGFIKRQLVETRQITKHVAQILDSRMNTKYDENDKLIREVKVITLKSKLVSD | |
| | FRKDFQFYKVREINNYHHAHDAYLNAVVGTALIKKYPKLESEFVYGDYKVYDV | |
| | RKMIAKSEQEIGKATAKYFFYSNIMNFFKTEITLANGEIRKRPLIETNGETGEI | |
| | VWDKGRDFATVRKVLSMPQVNIVKKTEVQTGGFSKESILPKRNSDKLIARKKD | |
| | WDPKKYGGFDSPTVAYSVLVVAKVEKGKSKKLKSVKELLGITIMERSSFEKNP | |
| | IDFLEAKGYKEVKKDLIIKLPKYSLFELENGRKRMLASAGELQKGNELALPSKY | |
| | VNFLYLASHYEKLKGSPEDNEQKQLFVEQHKHYLDEIIEQISEFSKRVILADAN | |
| | LDKVLSAYNKHRDKPIREQAENIIHLFTLTNLGAPAAFKYFDTTIDRKRYTSTK | |
| | EVLDATLIHQSITGLYETRIDLSQLGGD | |
| Cas9 nickase | MDKKYSIGLDIGTNSVGWAVITDEYKVPSKKFKVLGNTDRHSIKKNLIGALLF | 90 |
| Streptococcus | DSGETAEATRLKRTARRRYTRRKNRICYLQEIFSNEMAKVDDSFFHRLEESFLV | |
| pyogenes | EEDKKHERHPIFGNIVDEVAYHEKYPTIYHLRKKLVDSTDKADLRLIYLALAH | |
| Q99ZW2 Cas9 | MIKFRGHFLIEGDLNPDNSDVDKLFIQLVQTYNQLFEENPINASGVDAKAILSA | |
| with H840A, | RLSKSRRLENLIAQLPGEKKNGLFGNLIALSLGLTPNFKSNFDLAEDAKLQLSK | |
| wherein X is | DTYDDDLDNLLAQIGDQYADLFLAAKNLSDAILLSDILRVNTEITKAPLSASMI | |
| any alternate | KRYDEHHQDLTLLKALVRQQLPEKYKEIFFDQSKNGYAGYIDGGASQEEFYKF | |
| amino acid | IKPILEKMDGTEELLVKLNREDLLRKQRTFDNGSIPHQIHLGELHAILRRQEDFY | |
| | PFLKDNREKIEKILTFRIPYYVGPLARGNSRFAWMTRKSEETITPWNFEEVVDK | |
| | GASAQSFIERMTNFDKNLPNEKVLPKHSLLYEYFTVYNELTKVKYVTEGMRKP | |
| | AFLSGEQKKAIVDLLFKTNRKVTVKQLKEDYFKKIECFDSVEISGVEDRFNASL | |
| | GTYHDLLKIIKDKDFLDNEENEDILEDIVLTLTLFEDREMIEERLKTYAHLFDDK | |
| | VMKQLKRRRYTGWGRLSRKLINGIRDKQSGKTILDFLKSDGFANRNFMQLIHD | |
| | DSLTFKEDIQKAQVSGQGDSLHEHIANLAGSPAIKKGILQTVKVVDELVKVMG | |
| | RHKPENIVIEMARENQTTQKGQKNSRERMKRIEEGIKELGSQILKEHPVENTQL | |
| | QNEKLYLYYLQNGRDMYVDQELDINRLSDYDVDAIVPQSFLKDDSIDNKVLTR | |
| | SDKNRGKSDNVPSEEVVKKMKNYWRQLLNAKLITQRKFDNLTKAERGGLSEL | |
| | DKAGFIKRQLVETRQITKHVAQILDSRMNTKYDENDKLIREVKVITLKSKLVSD | |
| | FRKDFQFYKVREINNYHHAHDAYLNAVVGTALIKKYPKLESEFVYGDYKVYDV | |
| | RKMIAKSEQEIGKATAKYFFYSNIMNFFKTEITLANGEIRKRPLIETNGETGEI | |
| | VWDKGRDFATVRKVLSMPQVNIVKKTEVQTGGFSKESILPKRNSDKLIARKKD | |
| | WDPKKYGGFDSPTVAYSVLVVAKVEKGKSKKLKSVKELLGITIMERSSFEKNP | |
| | IDFLEAKGYKEVKKDLIIKLPKYSLFELENGRKRMLASAGELQKGNELALPSKY | |
| | VNFLYLASHYEKLKGSPEDNEQKQLFVEQHKHYLDEIIEQISEFSKRVILADAN | |
| | LDKVLSAYNKHRDKPIREQAENIIHLFTLTNLGAPAAFKYFDTTIDRKRYTSTK | |
| | EVLDATLIHQSITGLYETRIDLSQLGGD | |
| Cas9 nickase | MDKKYSIGLDIGTNSVGWAVITDEYKVPSKKFKVLGNTDRHSIKKNLIGALLF | 91 |
| Q99ZW2 Cas9 | DSGETAEATRLKRTARRRYTRRKNRICYLQEIFSNEMAKVDDSFFHRLEESFLV | |
| Streptococcus | MIKFRGHFLIEGDLNPDNSDVDKLFIQLVQTYNQLFEENPINASGVDAKAILSA | |
| pyogenes | EEDKKHERHPIFGNIVDEVAYHEKYPTIYHLRKKLVDSTDKADLRLIYLALAH | |
| with R863X, | RLSKSRRLENLIAQLPGEKKNGLFGNLIALSLGLTPNFKSNFDLAEDAKLQLSK | |
| wherein X is | DTYDDDLDNLLAQIGDQYADLFLAAKNLSDAILLSDILRVNTEITKAPLSASMI | |
| any alternate | KRYDEHHQDLTLLKALVRQQLPEKYKEIFFDQSKNGYAGYIDGGASQEEFYKF | |
| amino acid | IKPILEKMDGTEELLVKLNREDLLRKQRTFDNGSIPHQIHLGELHAILRRQEDFY | |
| | PFLKDNREKIEKILTFRIPYYVGPLARGNSRFAWMTRKSEETITPWNFEEVVDK | |
| | GASAQSFIERMTNFDKNLPNEKVLPKHSLLYEYFTVYNELTKVKYVTEGMRKP | |
| | AFLSGEQKKAIVDLLFKTNRKVTVKQLKEDYFKKIECFDSVEISGVEDRFNASL | |
| | GTYHDLLKIIKDKDFLDNEENEDILEDIVLTLTLFEDREMIEERLKTYAHLFDDK | |
| | VMKQLKRRRYTGWGRLSRKLINGIRDKQSGKTILDFLKSDGFANRNFMQLIHD | |
| | DSLTFKEDIQKAQVSGQGDSLHEHIANLAGSPAIKKGILQTVKVVDELVKVMG | |
| | RHKPENIVIEMARENQTTQKGQKNSRERMKRIEEGIKELGSQILKEHPVENTQL | |
| | QNEKLYLYYLQNGRDMYVDQELDINRLSDYDVDHIVPQSFLKDDSIDNKVLTR | |
| | SDKNXGKSDNVPSEEVVKKMKNYWRQLLNAKLITQRKFDNLTKAERGGLSEL | |
| | DKAGFIKRQLVETRQITKHVAQILDSRMNTKYDENDKLIREVKVITLKSKLVSD | |
| | FRKDFQFYKVREINNYHHAHDAYLNAVVGTALIKKYPKLESEFVYGDYKVYD | |
| | VRKMIAKSEQEIGKATAKYFFYSNIMNFFKTEITLANGEIRKRPLIETNGETGEIV | |
| | WDKGRDFATVRKVLSMPQVNIVKKTEVQTGGFSKESILPKRNSDKLIARKKD | |
| | WDPKKYGGFDSPTVAYSVLVVAKVEKGKSKKLKSVKELLGITIMERSSFEKNP | |
| | IDFLEAKGYKEVKKDLIIKLPKYSLFELENGRKRMLASAGELQKGNELALPSKY | |
| | VNFLYLASHYEKLKGSPEDNEQKQLFVEQHKHYLDEIIEQISEFSKRVILADAN | |
| | LDKVLSAYNKHRDKPIREQAENIIHLFTLTNLGAPAAFKYFDTTIDRKRYTSTK | |
| | EVLDATLIHQSITGLYETRIDLSQLGGD | |
| Cas9 nickase | MDKKYSIGLDIGTNSVGWAVITDEYKVPSKKFKVLGNTDRHSIKKNLIGALLF | 92 |
| Streptococcus | DSGETAEATRLKRTARRRYTRRKNRICYLQEIFSNEMAKVDDSFFHRLEESFLV | |
| pyogenes | EEDKKHERHPIFGNIVDEVAYHEKYPTIYHLRKKLVDSTDKADLRLIYLALAH | |
| Q99ZW2 Cas9 | MIKFRGHFLIEGDLNPDNSDVDKLFIQLVQTYNQLFEENPINASGVDAKAILSA | |
| with R863A, | RLSKSRRLENLIAQLPGEKKNGLFGNLIALSLGLTPNFKSNFDLAEDAKLQLSK | |
| wherein X is | DTYDDDLDNLLAQIGDQYADLFLAAKNLSDAILLSDILRVNTEITKAPLSASMI | |
| any alternate | KRYDEHHQDLTLLKALVRQQLPEKYKEIFFDQSKNGYAGYIDGGASQEEFYKFI | |
| amino acid | KPILEKMDGTEELLVKLNREDLLRKQRTFDNGSIPHQIHLGELHAILRRQEDFY | |
| | PFLKDNREKIEKILTFRIPYYVGPLARGNSRFAWMTRKSEETITPWNFEEVVDK | |
| | GASAQSFIERMTNFDKNLPNEKVLPKHSLLYEYFTVYNELTKVKYVTEGMRKP | |
| | AFLSGEQKKAIVDLLFKTNRKVTVKQLKEDYFKKIECFDSVEISGVEDRFNASL | |
| | GTYHDLLKIIKDKDFLDNEENEDILEDIVLTLTLFEDREMIEERLKTYAHLFDD | |
| | KVMKQLKRRRYTGWGRLSRKLINGIRDKQSGKTILDFLKSDGFANRNFMQLIHD | |
| | DSLTFKEDIQKAQVSGQGDSLHEHIANLAGSPAIKKGILQTVKVVDELVKVMG | |
| | RHKPENIVIEMARENQTTQKGQKNSRERMKRIEEGIKELGSQILKEHPVENTQL | |
| | QNEKLYLYYLQNGRDMYVDQELDINRLSDYDVDHIVPQSFLKDDSIDNKVLTR | |
| | SDKNAGKSDNVPSEEVVKKMKNYWRQLLNAKLITQRKFDNLTKAERGGLSEL | |
| | DKAGFIKRQLVETRQITKHVAQILDSRMNTKYDENDKLIREVKVITLKSKLVSD | |
| | FRKDFQFYKVREINNYHHAHDAYLNAVVGTALIKKYPKLESEFVYGDYKVYD | |
| | VRKMIAKSEQEIGKATAKYFFYSNIMNFFKTEITLANGEIRKRPLIETNGETGE | |
| | IVWDKGRDFATVRKVLSMPQVNIVKKTEVQTGGFSKESILPKRNSDKLIARKKD | |
| | WDPKKYGGFDSPTVAYSVLVVAKVEKGKSKKLKSVKELLGITIMERSSFEKNP | |
| | IDFLEAKGYKEVKKDLIIKLPKYSLFELENGRKRMLASAGELQKGNELALPSKY | |
| | VNFLYLASHYEKLKGSPEDNEQKQLFVEQHKHYLDEIIEQISEFSKRVILADAN | |
| | LDKVLSAYNKHRDKPIREQAENIIHLFTLTNLGAPAAFKYFDTTIDRKRYTSTK | |
| | EVLDATLIHQSITGLYETRIDLSQLGGD | |

[0302] In some embodiments, the N-terminal methionine is removed from a Cas9 nickase, or from any Cas9 variant, ortholog, or equivalent disclosed or contemplated herein. For example, methionine-minus Cas9 nickases include the following sequences, or a variant thereof having an amino acid sequence that has at least 80%, at least 85%, at least 90%, at least 95%, or at least 99% sequence identity thereto.

| Description | Sequence |
|---|---|
| Cas9 nickase | DKKYSIGLDIGTNSVGWAVITDEYKVPSKKFKVLGNTDRHSIKKNLIGALLFDSGET |
| (Met minus) | AEATRLKRTARRRYTRRKNRICYLQEIFSNEMAKVDDSFFHRLEESFLVEEDKKHER |
| Streptococcus | HPIFGNIVDEVAYHEKYPTIYHLRKKLVDSTDKADLRLIYLALAHMIKFRGHFLIEGD |
| pyogenes | LNPDNSDVDKLFIQLVQTYNQLFEENPINASGVDAKAILSARLSKSRRLENLIAQLPG |
| Q99ZW2 Cas9 | EKKNGLFGNLIALSLGLTPNFKSNFDLAEDAKLQLSKDTYDDDLDNLLAQIGDQYA |
| with H840X, | DLFLAAKNLSDAILLSDILRVNTEITKAPLSASMIKRYDEHHQDLTLLKALVRQQLPE |
| wherein X is | KYKEIFFDQSKNGYAGYIDGGASQEEFYKFIKPILEKMDGTEELLVKLNREDLLRKQ |
| any alternate | RTFDNGSIPHQIHLGELHAILRRQEDFYPFLKDNREKIEKILTFRIPYYVGPLARGNS |
| amino acid | RFAWMTRKSEETITPWNFEEVVDKGASAQSFIERMTNFDKNLPNEKVLPKHSLLYEY |
| | FTVYNELTKVKYVTEGMRKPAFLSGEQKKAIVDLLFKTNRKVTVKQLKEDYFKKIE |
| | CFDSVEISGVEDRFNASLGTYHDLLKIIKDKDFLDNEENEDILEDIVLTLTLFEDREMI |
| | EERLKTYAHLFDDKVMKQLKRRRYTGWGRLSRKLINGIRDKQSGKTILDFLKSDGF |
| | ANRNFMQLIHDDSLTFKEDIQKAQVSGQGDSLHEHIANLAGSPAIKKGILQTVKVVD |
| | ELVKVMGRHKPENIVIEMARENQTTQKGQKNSRERMKRIEEGIKELGSQILKEHPVE |
| | NTQLQNEKLYLYYLQNGRDMYVDQELDINRLSDYDVDXIVPQSFLKDDSIDNKVLT |
| | RSDKNRGKSDNVPSEEVVKKMKNYWRQLLNAKLITQRKFDNLTKAERGGLSELDK |
| | AGFIKRQLVETRQITKHVAQILDSRMNTKYDENDKLIREVKVITLKSKLVSDFRKDF |
| | QFYKVREINNYHHAHDAYLNAVVGTALIKKYPKLESEFVYGDYKVYDVRKMIAKS |
| | EQEIGKATAKYFFYSNIMNFFKTEITLANGEIRKRPLIETNGETGEIVWDKGRDFATV |
| | RKVLSMPQVNIVKKTEVQTGGFSKESILPKRNSDKLIARKKDWDPKKYGGFDSPTV |
| | AYSVLVVAKVEKGKSKKLKSVKELLGITIMERSSFEKNPIDFLEAKGYKEVKKDLIIK |
| | LPKYSLFELENGRKRMLASAGELQKGNELALPSKYVNFLYLASHYEKLKGSPEDNE |
| | QKOLFVEQHKHYLDEIIEQISEFSKRVILADANLDKVLSAYNKHRDKPIREQAENIIH |
| | LFTLTNLGAPAAFKYFDTTIDRKRYTSTKEVLDATLIHQSITGLYETRIDLSQLGGD |
| | (SEQ ID NO: 93) |
| Cas9 nickase | DKKYSIGLDIGTNSVGWAVITDEYKVPSKKFKVLGNTDRHSIKKNLIGALLFDSGET |
| (Met minus) | AEATRLKRTARRRYTRRKNRICYLQEIFSNEMAKVDDSFFHRLEESFLVEEDKKHER |
| Streptococcus | HPIFGNIVDEVAYHEKYPTIYHLRKKLVDSTDKADLRLIYLALAHMIKFRGHFLIEGD |
| pyogenes | LNPDNSDVDKLFIQLVQTYNQLFEENPINASGVDAKAILSARLSKSRRLENLIAQLPG |
| Q99ZW2 Cas9 | EKKNGLFGNLIALSLGLTPNFKSNFDLAEDAKLQLSKDTYDDDLDNLLAQIGDQYA |
| with H840A, | DLFLAAKNLSDAILLSDILRVNTEITKAPLSASMIKRYDEHHQDLTLLKALVRQQLPE |
| wherein X is | KYKEIFFDQSKNGYAGYIDGGASQEEFYKFIKPILEKMDGTEELLVKLNREDLLRKQ |
| any alternate | RTFDNGSIPHQIHLGELHAILRRQEDFYPFLKDNREKIEKILTFRIPYYVGPLARGNSR |
| amino acid | FAWMTRKSEETITPWNFEEVVDKGASAQSFIERMTNFDKNLPNEKVLPKHSLLYEY |
| | FTVYNELTKVKYVTEGMRKPAFLSGEQKKAIVDLLFKTNRKVTVKQLKEDYFKKIE |
| | CFDSVEISGVEDRFNASLGTYHDLLKIIKDKDFLDNEENEDILEDIVLTLTLFEDREMI |
| | EERLKTYAHLFDDKVMKQLKRRRYTGWGRLSRKLINGIRDKQSGKTILDFLKSDGF |
| | ANRNFMQLIHDDSLTFKEDIQKAQVSGQGDSLHEHIANLAGSPAIKKGILQTVKVVD |
| | ELVKVMGRHKPENIVIEMARENQTTQKGQKNSRERMKRIEEGIKELGSQILKEHPVE |
| | NTQLQNEKLYLYYLQNGRDMYVDQELDINRLSDYDVDAIVPQSFLKDDSIDNKVLT |
| | RSDKNRGKSDNVPSEEVVKKMKNYWRQLLNAKLITQRKFDNLTKAERGGLSELDK |
| | AGFIKRQLVETRQITKHVAQILDSRMNTKYDENDKLIREVKVITLKSKLVSDFRKDF |
| | QFYKVREINNYHHAHDAYLNAVVGTALIKKYPKLESEFVYGDYKVYDVRKMIAKS |
| | EQEIGKATAKYFFYSNIMNFFKTEITLANGEIRKRPLIETNGETGEIVWDKGRDFATV |
| | RKVLSMPQVNIVKKTEVQTGGFSKESILPKRNSDKLIARKKDWDPKKYGGFDSPTV |
| | AYSVLVVAKVEKGKSKKLKSVKELLGITIMERSSFEKNPIDFLEAKGYKEVKKDLIIK |
| | LPKYSLFELENGRKRMLASAGELQKGNELALPSKYVNFLYLASHYEKLKGSPEDNE |
| | QKQLFVEQHKHYLDEIIEQISEFSKRVILADANLDKVLSAYNKHRDKPIREQAENIIH |
| | LFTLTNLGAPAAFKYFDTTIDRKRYTSTKEVLDATLIHQSITGLYETRIDLSQLGGD |
| | (SEQ ID NO: 94) |
| Cas9 nickase | DKKYSIGLDIGTNSVGWAVITDEYKVPSKKFKVLGNTDRHSIKKNLIGALLFDSGET |
| (Met minus) | AEATRLKRTARRRYTRRKNRICYLQEIFSNEMAKVDDSFFHRLEESFLVEEDKKHER |
| Streptococcus | HPIFGNIVDEVAYHEKYPTIYHLRKKLVDSTDKADLRLIYLALAHMIKFRGHFLIEGD |
| pyogenes | LNPDNSDVDKLFIQLVQTYNQLFEENPINASGVDAKAILSARLSKSRRLENLIAQLPG |
| Q99ZW2 Cas9 | EKKNGLFGNLIALSLGLTPNFKSNFDLAEDAKLQLSKDTYDDDLDNLLAQIGDQYA |
| with R863X, | DLFLAAKNLSDAILLSDILRVNTEITKAPLSASMIKRYDEHHQDLTLLKALVRQQLPE |
| wherein X is | KYKEIFFDQSKNGYAGYIDGGASQEEFYKFIKPILEKMDGTEELLVKLNREDLLRKQ |
| any | RTFDNGSIPHQIHLGELHAILRRQEDFYPFLKDNREKIEKILTFRIPYYVGPLARGNSR |
| alternate | FAWMTRKSEETITPWNFEEVVDKGASAQSFIERMTNFDKNLPNEKVLPKHSLLYEY |
| amino acid | FTVYNELTKVKYVTEGMRKPAFLSGEQKKAIVDLLFKTNRKVTVKQLKEDYFKKIE |
| | CFDSVEISGVEDRFNASLGTYHDLLKIIKDKDFLDNEENEDILEDIVLTLTLFEDREMI |
| | EERLKTYAHLFDDKVMKQLKRRRYTGWGRLSRKLINGIRDKQSGKTILDFLKSDGF |
| | ANRNFMQLIHDDSLTFKEDIQKAQVSGQGDSLHEHIANLAGSPAIKKGILQTVKVVD |
| | ELVKVMGRHKPENIVIEMARENQTTQKGQKNSRERMKRIEEGIKELGSQILKEHPVE |
| | NTQLQNEKLYLYYLQNGRDMYVDQELDINRLSDYDVDHIVPQSFLKDDSIDNKVLT |
| | RSDKNXGKSDNVPSEEVVKKMKNYWRQLLNAKLITQRKFDNLTKAERGGLSELDK |
| | AGFIKRQLVETRQITKHVAQILDSRMNTKYDENDKLIREVKVITLKSKLVSDFRKDF |
| | QFYKVREINNYHHAHDAYLNAVVGTALIKKYPKLESEFVYGDYKVYDVRKMIAKS |
| | EQEIGKATAKYFFYSNIMNFFKTEITLANGEIRKRPLIETNGETGEIVWDKGRDFATV |
| | RKVLSMPQVNIVKKTEVQTGGFSKESILPKRNSDKLIARKKDWDPKKYGGFDSPTV |
| | AYSVLVVAKVEKGKSKKLKSVKELLGITIMERSSFEKNPIDFLEAKGYKEVKKDLIIK |
| | LPKYSLFELENGRKRMLASAGELQKGNELALPSKYVNFLYLASHYEKLKGSPEDNE |
| | QKQLFVEQHKHYLDEIIEQISEFSKRVILADANLDKVLSAYNKHRDKPIREQAENIIH |
| | LFTLTNLGAPAAFKYFDTTIDRKRYTSTKEVLDATLIHQSITGLYETRIDLSQLGGD |
| | (SEQ ID NO: 95) |
| Cas9 nickase | DKKYSIGLDIGTNSVGWAVITDEYKVPSKKFKVLGNTDRHSIKKNLIGALLFDSGET |
| (Met minus) | AEATRLKRTARRRYTRRKNRICYLQEIFSNEMAKVDDSFFHRLEESFLVEEDKKHER |
| Streptococcus | HPIFGNIVDEVAYHEKYPTIYHLRKKLVDSTDKADLRLIYLALAHMIKFRGHFLIEGD |
| pyogenes | LNPDNSDVDKLFIQLVQTYNQLFEENPINASGVDAKAILSARLSKSRRLENLIAQLPG |
| Q99ZW2 Cas9 | EKKNGLFGNLIALSLGLTPNFKSNFDLAEDAKLQLSKDTYDDDLDNLLAQIGDQYA |
| with R863A, | DLFLAAKNLSDAILLSDILRVNTEITKAPLSASMIKRYDEHHQDLTLLKALVRQQLPE |
| wherein X is | KYKEIFFDQSKNGYAGYIDGGASQEEFYKFIKPILEKMDGTEELLVKLNREDLLRKQ |
| any alternate | RTFDNGSIPHQIHLGELHAILRRQEDFYPFLKDNREKIEKILTFRIPYYVGPLARGNSR |
| amino acid | FAWMTRKSEETITPWNFEEVVDKGASAQSFIERMTNFDKNLPNEKVLPKHSLLYEY |
| | FTVYNELTKVKYVTEGMRKPAFLSGEQKKAIVDLLFKTNRKVTVKQLKEDYFKKIE |
| | CFDSVEISGVEDRFNASLGTYHDLLKIIKDKDFLDNEENEDILEDIVLTLTLFEDREMI |
| | EERLKTYAHLFDDKVMKQLKRRRYTGWGRLSRKLINGIRDKQSGKTILDFLKSDGF |
| | ANRNFMQLIHDDSLTFKEDIQKAQVSGQGDSLHEHIANLAGSPAIKKGILQTVKVVD |
| | ELVKVMGRHKPENIVIEMARENQTTQKGQKNSRERMKRIEEGIKELGSQILKEHPVE |
| | NTQLQNEKLYLYYLONGRDMYVDQELDINRLSDYDVDHIVPQSFLKDDSIDNKVLT |
| | RSDKNAGKSDNVPSEEVVKKMKNYWRQLLNAKLITQRKFDNLTKAERGGLSELDK |
| | AGFIKRQLVETRQITKHVAQILDSRMNTKYDENDKLIREVKVITLKSKLVSDFRKDF |
| | QFYKVREINNYHHAHDAYLNAVVGTALIKKYPKLESEFVYGDYKVYDVRKMIAKS |
| | EQEIGKATAKYFFYSNIMNFFKTEITLANGEIRKRPLIETNGETGEIVWDKGRDFATV |
| | RKVLSMPQVNIVKKTEVQTGGFSKESILPKRNSDKLIARKKDWDPKKYGGFDSPTV |
| | AYSVLVVAKVEKGKSKKLKSVKELLGITIMERSSFEKNPIDFLEAKGYKEVKKDLIIK |
| | LPKYSLFELENGRKRMLASAGELQKGNELALPSKYVNFLYLASHYEKLKGSPEDNE |
| | QKQLFVEQHKHYLDEIIEQISEFSKRVILADANLDKVLSAYNKHRDKPIREQAENIIH |
| | LFTLTNLGAPAAFKYFDTTIDRKRYTSTKEVLDATLIHQSITGLYETRIDLSQLGGD |
| | (SEQ ID NO: 96) |

### (5) Other Cas9 Variants

[0303] Besides dead Cas9 and Cas9 nickase variants, the Cas9 proteins used herein may also include other “Cas9 variants” having at least about 70% identical, at least about 80% identical, at least about 90% identical, at least about 95% identical, at least about 96% identical, at least about 97% identical, at least about 98% identical, at least about 99% identical, at least about 99.5% identical, or at least about 99.9% identical to any reference Cas9 protein, including any wild type Cas9, or mutant Cas9 (e.g., a dead Cas9 or Cas9 nickase), or fragment Cas9, or circular permutant Cas9, or other variant of Cas9 disclosed herein or known in the art. In some embodiments, a Cas9 variant may have 1, 2,3, 4,5, 6,7, 8, 9,10,11, 12,13, 14,15, 16,17, 18, 19,20,21, 22, 21,24, 25, 26, 27, 28, 29, 30, 31, 32, 33, 34, 35, 36, 37, 38, 39, 40, 41, 42, 43, 44, 45, 46, 47, 48, 49, 50 or more amino acid changes compared to a reference Cas9. In some embodiments, the Cas9 variant comprises a fragment of a reference Cas9 (e.g., a gRNA binding domain or a DNA-cleavage domain), such that the fragment is at least about 70% identical, at least about 80% identical, at least about 90% identical, at least about 95% identical, at least about 96% identical, at least about 97% identical, at least about 98% identical, at least about 99% identical, at least about 99.5% identical, or at least about 99.9% identical to the corresponding fragment of wild type Cas9. In some embodiments, the fragment is at least 30%, at least 35%, at least 40%, at least 45%, at least 50%, at least 55%, at least 60%, at least 65%, at least 70%, at least 75%, at least 80%, at least 85%, at least 90%, at least 95% identical, at least 96%, at least 97%, at least 98%, at least 99%, or at least 99.5% of the amino acid length of a corresponding wild type Cas9 (e.g., SEQ ID NO: 59).

[0304] In some embodiments, the disclosure also may utilize Cas9 fragments which retain their functionality and which are fragments of any herein disclosed Cas9 protein. In some embodiments, the Cas9 fragment is at least 100 amino acids in length. In some embodiments, the fragment is at least 100, 150, 200, 250, 300, 350, 400, 450, 500, 550, 600, 650, 700, 750, 800, 850, 900, 950, 1000, 1050, 1100, 1150, 1200, 1250, or at least 1300 amino acids in length.

[0305] In various embodiments, the base editors disclosed herein may comprise one of the Cas9 variants described as follows, or a Cas9 variant thereof having at least about 70% identical, at least about 80% identical, at least about 90% identical, at least about 95% identical, at least about 96% identical, at least about 97% identical, at least about 98% identical, at least about 99% identical, at least about 99.5% identical, or at least about 99.9% identical to any reference Cas9 variants.

### (6) Small-Sized Cas9 Variants

[0306] In some embodiments, the base editors contemplated herein can include a Cas9 protein that is of smaller molecular weight than the canonical SpCas9 sequence. In some embodiments, the smaller-sized Cas9 variants may facilitate delivery to cells, e.g., by an expression vector, nanoparticle, or other means of delivery.

[0307] The canonical SpCas9 protein is 1368 amino acids in length and has a predicted molecular weight of 158 kilodaltons. The term “small-sized Cas9 variant”, as used herein, refers to any Cas9 variant—naturally occurring, engineered, or otherwise—that is less than at least 1300 amino acids, or at least less than 1290 amino acids, or than less than 1280 amino acids, or less than 1270 amino acid, or less than 1260 amino acid, or less than 1250 amino acids, or less than 1240 amino acids, or less than 1230 amino acids, or less than 1220 amino acids, or less than 1210 amino acids, or less than 1200 amino acids, or less than 1190 amino acids, or less than 1180 amino acids, or less than 1170 amino acids, or less than 1160 amino acids, or less than 1150 amino acids, or less than 1140 amino acids, or less than 1130 amino acids, or less than 1120 amino acids, or less than 1110 amino acids, or less than 1100 amino acids, or less than 1050 amino acids, or less than 1000 amino acids, or less than 950 amino acids, or less than 900 amino acids, or less than 850 amino acids, or less than 800 amino acids, or less than 750 amino acids, or less than 700 amino acids, or less than 650 amino acids, or less than 600 amino acids, or less than 550 amino acids, or less than 500 amino acids, but at least larger than about 400 amino acids and retaining the required functions of the Cas9 protein.

[0308] In various embodiments, the base editors disclosed herein may comprise one of the small-sized Cas9 variants described as follows, or a Cas9 variant thereof having at least about 70% identical, at least about 80% identical, at least about 90% identical, at least about 95% identical, at least about 96% identical, at least about 97% identical, at least about 98% identical, at least about 99% identical, at least about 99.5% identical, or at least about 99.9% identical to any reference small-sized Cas9 protein.

| | | SEQ |
|---|---|---|
| | | ID |
| Description | Sequence | NO: |
| SaCas9 | MGKRNYILGLDIGITSVGYGIIDYETRDVIDAGVRLFKEANVENNEGRRSKRG | 67 |
| Staphylococcus | ARRLKRRRRHRIQRVKKLLFDYNLLTDHSELSGINPYEARVKGLSQKLSEEEF | |
| aureus | SAALLHLAKRRGVHNVNEVEEDTGNELSTKEQISRNSKALEEKYVAELQLER | |
| 1053 AA | LKKDGEVRGSINRFKTSDYVKEAKQLLKVQKAYHQLDQSFIDTYIDLLETRRT | |
| 123 kDa | YYEGPGEGSPFGWKDIKEWYEMLMGHCTYFPEELRSVKYAYNADLYNALN | |
| | DLNNLVITRDENEKLEYYEKFQIIENVFKQKKKPTLKQIAKEILVNEEDIKGYR | |
| | VTSTGKPEFTNLKVYHDIKDITARKEIIENAELLDQIAKILTIYQSSEDIQEELTN | |
| | LNSELTQEEIEQISNLKGYTGTHNLSLKAINLILDELWHTNDNQIAIFNRLKLVPK | |
| | KVDLSQQKEIPTTLVDDFILSPVVKRSFIQSIKVINAIIKKYGLPNDIIIELAREK | |
| | NSKDAQKMINEMQKRNRQTNERIEEIIRTTGKENAKYLIEKIKLHDMQEGKCL | |
| | YSLEAIPLEDLLNNPFNYEVDHIIPRSVSFDNSFNNKVLVKQEENSKKGNRTPF | |
| | QYLSSSDSKISYETFKKHILNLAKGKGRISKTKKEYLLEERDINRFSVQKDFINR | |
| | NLVDTRYATRGLMNLLRSYFRVNNLDVKVKSINGGFTSFLRRKWKFKKERN | |
| | KGYKHHAEDALIIANADFIFKEWKKLDKAKKVMENQMFEEKQAESMPEIETE | |
| | QEYKEIFITPHQIKHIKDFKDYKYSHRVDKKPNRKLINDTLYSTRKDDKGNTLI | |
| | VNNLNGLYDKDNDKLKKLINKSPEKLLMYHHDPQTYQKLKLIMEQYGDEKN | |
| | PLYKYYEETGNYLTKYSKKDNGPVIKKIKYYGNKLNAHLDITDDYPNSRNKV | |
| | VKLSLKPYRFDVYLDNGVYKFVTVKNLDVIKKENYYEVNSKCYEEAKKLKK | |
| | ISNQAEFIASFYKNDLIKINGELYRVIGVNNDLLNRIEVNMIDITYREYLENMN | |
| | DKRPPHIIKTIASKTQSIKKYSTDILGNLYEVKSKKHPQIIKK | |
| NmeCas9 | MAAFKPNSINYILGLDIGIASVGWAMVEIDEEENPIRLIDLGVRVFERAEVPKT | 97 |
| N. meningitidis | GDSLAMARRLARSVRRLTRRRAHRLLRTRRLLKREGVLQAANFDENGLIKSL | |
| 1083 AA | PNTPWQLRAAALDRKLTPLEWSAVLLHLIKHRGYLSQRKNEGETADKELGAL | |
| 124.5 kDa | LKGVAGNAHALQTGDFRTPAELALNKFEKESGHIRNQRSDYSHTFSRKDLQA | |
| | ELILLFEKQKEFGNPHVSGGLKEGIETLLMTQRPALSGDAVQKMLGHCTFEPA | |
| | EPKAAKNTYTAERFIWLTKLNNLRILEQGSERPLTDTERATLMDEPYRKSKLT | |
| | YAQARKLLGLEDTAFFKGLRYGKDNAEASTLMEMKAYHAISRALEKEGLKD | |
| | KKSPLNLSPELQDEIGTAFSLFKTDEDITGRLKDRIQPEILEALLKHISFDKFVQI | |
| | SLKALRRIVPLMEQGKRYDEACAEIYGDHYGKKNTEEKIYLPPIPADEIRNPV | |
| | VLRALSQARKVINGVVRRYGSPARIHIETAREVGKSFKDRKEIEKRQEENRKD | |
| | REKAAAKFREYFPNFVGEPKSKDILKLRLYEQQHGKCLYSGKEINLGRLNEK | |
| | GYVEIDAALPFSRTWDDSFNNKVLVLGSENQNKGNQTPYEYFNGKDNSREW | |
| | QEFKARVETSRFPRSKKQRILLQKFDEDGFKERNLNDTRYVNRFLCQFVADR | |
| | MRLTGKGKKRVFASNGQITNLLRGFWGLRKVRAENDRHHALDAVVVACST | |
| | VAMQQKITRFVRYKEMNAFDGKTIDKETGEVLHQKTHFPQPWEFFAQEVMIR | |
| | VFGKPDGKPEFEEADTLEKLRTLLAEKLSSRPEAVHEYVTPLFVSRAPNRKMS | |
| | GQGHMETVKSAKRLDEGVSVLRVPLTQLKLKDLEKMVNREREPKLYEALKA | |
| | RLEAHKDDPAKAFAEPFYKYDKAGNRTQQVKAVRVEQVQKTGVWVRNHN | |
| | GIADNATMVRVDVFEKGDKYYLVPIYSWQVAKGILPDRAVVQGKDEEDWQ | |
| | LIDDSFNFKFSLHPNDLVEVITKKARMFGYFASCHRGTGNINIRIHDLDHKIGK | |
| | NGILEGIGVKTALSFQKYQIDELGKEIRPCRLKKRPPVR | |
| CjCas9 | MARILAFDIGISSIGWAFSENDELKDCGVRIFTKVENPKTGESLALPRRLARSA | 98 |
| C. jejuni | RKRLARRKARLNHLKHLIANEFKLNYEDYQSFDESLAKAYKGSLISPYELRFR | |
| 984 AA | ALNELLSKQDFARVILHIAKRRGYDDIKNSDDKEKGAILKAIKQNEEKLANYQ | |
| 114.9 kDa | SVGEYLYKEYFQKFKENSKEFTNVRNKKESYERCIAQSFLKDELKLIFKKQRE | |
| | FGFSFSKKFEEEVLSVAFYKRALKDFSHLVGNCSFFTDEKRAPKNSPLAFMFV | |
| | ALTRIINLLNNLKNTEGILYTKDDLNALLNEVLKNGTLTYKQTKKLLGLSDDY | |
| | EFKGEKGTYFIEFKKYKEFIKALGEHNLSQDDLNEIAKDITLIKDEIKLKKALA | |
| | KYDLNQNQIDSLSKLEFKDHLNISFKALKLVTPLMLEGKKYDEACNELNLKV | |
| | AINEDKKDFLPAFNETYYKDEVTNPVVLRAIKEYRKVLNALLKKYGKVHKIN | |
| | IELAREVGKNHSQRAKIEKEQNENYKAKKDAELECEKLGLKINSKNILKLRLF | |
| | KEQKEFCAYSGEKIKISDLQDEKMLEIDHIYPYSRSFDDSYMNKVLVFTKQNQ | |
| | EKLNQTPFEAFGNDSAKWQKIEVLAKNLPTKKQKRILDKNYKDKEQKNFKD | |
| | RNLNDTRYIARLVLNYTKDYLDFLPLSDDENTKLNDTQKGSKVHVEAKSGM | |
| | LTSALRHTWGFSAKDRNNHLHHAIDAVIIAYANNSIVKAFSDFKKEQESNSAE | |
| | LYAKKISELDYKNKRKFFEPFSGFRQKVLDKIDEIFVSKPERKKPSGALHEETF | |
| | RKEEEFYQSYGGKEGVLKALELGKIRKVNGKIVKNGDMFRVDIFKHKKTNKF | |
| | YAVPIYTMDFALKVLPNKAVARSKKGEIKDWILMDENYEFCFSLYKDSLILIQ | |
| | TKDMQEPEFVYYNAFTSSTVSLIVSKHDNKFETLSKNQKILFKNANEKEVIAK | |
| | SIGIQNLKVFEKYIVSALGEVTKAEFRQREDFKK | |
| GeoCas9 | MRYKIGLDIGITSVGWAVMNLDIPRIEDLGVRIFDRAENPQTGESLALPRRLAR | 99 |
| G. stearothermophilus | SARRRLRRRKHRLERIRRLVIREGILTKEELDKLFEEKHEIDVWQLRVEALDR | |
| 1087 AA | KLNNDELARVLLHLAKRRGFKSNRKSERSNKENSTMLKHIEENRAILSSYRTV | |
| 127 kDa | GEMIVKDPKFALHKRNKGENYTNTIARDDLEREIRLIFSKQREFGNMSCTEEF | |
| | ENEYITIWASQRPVASKDDIEKKVGFCTFEPKEKRAPKATYTFQSFIAWEHINK | |
| | LRLISPSGARGLTDEERRLLYEQAFQKNKITYHDIRTLLHLPDDTYFKGIVYDR | |
| | GESRKQNENIRFLELDAYHQIRKAVDKVYGKGKSSSFLPIDFDTFGYALTLFK | |
| | DDADIHSYLRNEYEQNGKRMPNLANKVYDNELIEELLNLSFTKFGHLSLKAL | |
| | RSILPYMEQGEVYSSACERAGYTFTGPKKKQKTMLLPNIPPIANPVVMRALTQ | |
| | ARKVVNAIIKKYGSPVSIHIELARDLSQTFDERRKTKKEQDENRKKNETAIRQL | |
| | MEYGLTLNPTGHDIVKFKLWSEQNGRCAYSLQPIEIERLLEPGYVEVDHVIPY | |
| | SRSLDDSYTNKVLVLTRENREKGNRIPAEYLGVGTERWQQFETFVLTNKQFS | |
| | KKKRDRLLRLHYDENEETEFKNRNLNDTRYISRFFANFIREHLKFAESDDKQK | |
| | VYTVNGRVTAHLRSRWEFNKNREESDLHHAVDAVIVACTTPSDIAKVTAFYQ | |
| | RREQNKELAKKTEPHFPQPWPHFADELRARLSKHPKESIKALNLGNYDDQKL | |
| | ESLQPVFVSRMPKRSVTGAAHQETLRRYVGIDERSGKIQTVVKTKLSEIKLDA | |
| | SGHFPMYGKESDPRTYEAIRQRLLEHNNDPKKAFQEPLYKPKKNGEPGPVIRT | |
| | VKIIDTKNQVIPLNDGKTVAYNSNIVRVDVFEKDGKYYCVPVYTMDIMKGILP | |
| | NKAIEPNKPYSEWKEMTEDYTFRFSLYPNDLIRIELPREKTVKTAAGEEINVKD | |
| | VFVYYKTIDSANGGLELISHDHRFSLRGVGSRTLKRFEKYQVDVLGNIYKVRG | |
| | EKRVGLASSAHSKPGKTIRPLQSTRD | |
| LbaCas12a | MSKLEKFTNCYSLSKTLRFKAIPVGKTQENIDNKRLLVEDEKRAEDYKGVKK | 100 |
| L. bacterium | LLDRYYLSFINDVLHSIKLKNLNNYISLFRKKTRTEKENKELENLEINLRKEIA | |
| 1228 AA | KAFKGNEGYKSLFKKDIIETILPEFLDDKDEIALVNSFNGFTTAFTGFFDNREN | |
| 143.9 kDa | MFSEEAKSTSIAFRCINENLTRYISNMDIFEKVDAIFDKHEVQEIKEKILNSDYD | |
| | VEDFFEGEFFNFVLTQEGIDVYNAIIGGFVTESGEKIKGLNEYINLYNQKTKQK | |
| | LPKFKPLYKQVLSDRESLSFYGEGYTSDEEVLEVFRNTLNKNSEIFSSIKKLEK | |
| | LFKNFDEYSSAGIFVKNGPAISTISKDIFGEWNVIRDKWNAEYDDIHLKKKAV | |
| | VTEKYEDDRRKSFKKIGSFSLEQLQEYADADLSVVEKLKEIIIQKVDEIYKVYG | |
| | SSEKLFDADFVLEKSLKKNDAVVAIMKDLLDSVKSFENYIKAFFGEGKETNR | |
| | DESFYGDFVLAYDILLKVDHIYDAIRNYVTQKPYSKDKFKLYFQNPQFMGGW | |
| | DKDKETDYRATILRYGSKYYLAIMDKKYAKCLQKIDKDDVNGNYEKINYKL | |
| | LPGPNKMLPKVFFSKKWMAYYNPSEDIQKIYKNGTFKKGDMFNLNDCHKLI | |
| | DFFKDSISRYPKWSNAYDFNFSETEKYKDIAGFYREVEEQGYKVSFESASKKE | |
| | VDKLVEEGKLYMFQIYNKDFSDKSHGTPNLHTMYFKLLFDENNHGQIRLSGG | |
| | AELFMRRASLKKEELVVHPANSPIANKNPDNPKKTTTLSYDVYKDKRFSEDQ | |
| | YELHIPIAINKCPKNIFKINTEVRVLLKHDDNPYVIGIDRGERNLLYIVVVDGK | |
| | GNIVEQYSLNEIINNFNGIRIKTDYHSLLDKKEKERFEARQNWTSIENIKELKA | |
| | GYISQVVHKICELVEKYDAVIALEDLNSGFKNSRVKVEKQVYQKFEKMLIDK | |
| | LNYMVDKKSNPCATGGALKGYQITNKFESFKSMSTQNGFIFYIPAWLTSKIDP | |
| | STGFVNLLKTKYTSIADSKKFISSFDRIMYVPEEDLFEFALDYKNFSRTDADYI | |
| | KKWKLYSYGNRIRIFRNPKKNNVFDWEEVCLTSAYKELFNKYGINYQQGDIR | |
| | ALLCEQSDKAFYSSFMALMSLMLQMRNSITGRTDVDFLISPVKNSDGIFYDSR | |
| | NYEAQENAILPKNADANGAYNIARKVLWAIGQFKKAEDEKLDKVKIAISNKE | |
| | WLEYAQTSVKH | |
| BhCas12b | MATRSFILKIEPNEEVKKGLWKTHEVLNHGIAYYMNILKLIRQEAIYEHHEQD | 101 |
| B. hisashii | PKNPKKVSKAEIQAELWDFVLKMQKCNSFTHEVDKDEVFNILRELYEELVPSS | |
| 1108 AA | VEKKGEANQLSNKFLYPLVDPNSQSGKGTASSGRKPRWYNLKIAGDPSWEEE | |
| 130.4 kDa | KKKWEEDKKKDPLAKILGKLAEYGLIPLFIPYTDSNEPIVKEIKWMEKSRNQS | |
| | VRRLDKDMFIQALERFLSWESWNLKVKEEYEKVEKEYKTLEERIKEDIQALK | |
| | ALEQYEKERQEQLLRDTLNTNEYRLSKRGLRGWREIIQKWLKMDENEPSEKY | |
| | LEVFKDYQRKHPREAGDYSVYEFLSKKENHFIWRNHPEYPYLYATFCEIDKK | |
| | KKDAKQQATFTLADPINHPLWVRFEERSGSNLNKYRILTEQLHTEKLKKKLT | |
| | VQLDRLIYPTESGGWEEKGKVDIVLLPSRQFYNQIFLDIEEKGKHAFTYKDESI | |
| | KFPLKGTLGGARVQFDRDHLRRYPHKVESGNVGRIYFNMTVNIEPTESPVSKS | |
| | LKIHRDDFPKVVNFKPKELTEWIKDSKGKKLKSGIESLEIGLRVMSIDLGQRQ | |
| | AAAASIFEVVDQKPDIEGKLFFPIKGTELYAVHRASFNIKLPGETLVKSREVLR | |
| | KAREDNLKLMNQKLNFLRNVLHFQQFEDITEREKRVTKWISRQENSDVPLVY | |
| | QDELIQIRELMYKPYKDWVAFLKQLHKRLEVEIGKEVKHWRKSLSDGRKGL | |
| | YGISLKNIDEIDRTRKFLLRWSLRPTEPGEVRRLEPGQRFAIDQLNHLNALKED | |
| | RLKKMANTIIMHALGYCYDVRKKKWQAKNPACQIILFEDLSNYNPYEERSRF | |
| | ENSKLMKWSRREIPRQVALQGEIYGLQVGEVGAQFSSRFHAKTGSPGIRCSVV | |
| | TKEKLQDNRFFKNLQREGRLTLDKIAVLKEGDLYPDKGGEKFISLSKDRKCVT | |
| | THADINAAQNLQKRFWTRTHGFYKVYCKAYQVDGQTVYIPESKDQKQKIIEE | |
| | FGEGYFILKDGVYEWVNAGKLKIKKGSSKQSSSELVDSDILKDSFDLASELKG | |
| | EKLMLYRDPSGNVFPSDKWMAAGVFFGKLERILISKLTNQYSISTIEDDSSKQS | |
| | M | |

### (7) Cas9 Equivalents

[0309] In some embodiments, the base editors described herein can include any Cas9 equivalent. As used herein, the term “Cas9 equivalent” is a broad term that encompasses any napDNAbp protein that serves the same function as Cas9 in the present base editors despite that its amino acid primary sequence and/or its three-dimensional structure may be different and/or unrelated from an evolutionary standpoint. Thus, while Cas9 equivalents include any Cas9 ortholog, homolog, mutant, or variant described or embraced herein that are evolutionarily related, the Cas9 equivalents also embrace proteins that may have evolved through convergent evolution processes to have the same or similar function as Cas9, but which do not necessarily have any similarity with regard to amino acid sequence and/or three dimensional structure. The base editors described here embrace any Cas9 equivalent that would provide the same or similar function as Cas9 despite that the Cas9 equivalent may be based on a protein that arose through convergent evolution.

[0310] For example, CasX is a Cas9 equivalent that reportedly has the same function as Cas9 but which evolved through convergent evolution. Thus, the CasX protein described in Liu et al., “CasX enzymes comprises a distinct family of RNA-guided genome editors,” Nature, 2019, Vol. 566: 218-223, is contemplated to be used with the base editors described herein. In addition, any variant or modification of CasX is conceivable and within the scope of the present disclosure.

[0311] Cas9 is a bacterial enzyme that evolved in a wide variety of species. However, the Cas9 equivalents contemplated herein may also be obtained from archaea, which constitute a domain and kingdom of single-celled prokaryotic microbes different from bacteria.

[0312] In some embodiments, Cas9 equivalents may refer to CasX or CasY, which have been described in, for example, Burstein et al., “New CRISPR-Cas systems from uncultivated microbes.” Cell Res. 2017 Feb. 21. doi: 10.1038/cr.2017.21, the entire contents of which is hereby incorporated by reference. Using genome-resolved metagenomics, a number of CRISPR-Cas systems were identified, including the first reported Cas9 in the archaeal domain of life. This divergent Cas9 protein was found in little-studied nanoarchaea as part of an active CRISPR-Cas system. In bacteria, two previously unknown systems were discovered, CRISPR-CasX and CRISPR-CasY, which are among the most compact systems yet discovered. In some embodiments, Cas9 refers to CasX, or a variant of CasX. In some embodiments, Cas9 refers to a CasY, or a variant of CasY. It should be appreciated that other RNA-guided DNA binding proteins may be used as a nucleic acid programmable DNA binding protein (napDNAbp), and are within the scope of this disclosure. Also see Liu et al., “CasX enzymes comprises a distinct family of RNA-guided genome editors,” Nature, 2019, Vol. 566: 218-223. Any of these Cas9 equivalents are contemplated.

[0313] In some embodiments, the Cas9 equivalent comprises an amino acid sequence that is at least 85%, at least 90%, at least 91%, at least 92%, at least 93%, at least 94%, at least 95%, at least 96%, at least 97%, at least 98%, at least 99%, or at least 99.5% identical to a naturally-occurring CasX or CasY protein. In some embodiments, the napDNAbp is a naturally-occurring CasX or CasY protein. In some embodiments, the napDNAbp comprises an amino acid sequence that is at least 85%, at least 90%, at least 91%, at least 92%, at least 93%, at least 94%, at least 95%, at least 96%, at least 97%, at least 98%, at least 99%, or at least 99.5% identical to a wild-type Cas moiety or any Cas moiety provided herein.

[0314] In various embodiments, the nucleic acid programmable DNA binding proteins include, without limitation, Cas9 (e.g., dCas9 and nCas9), CasX, CasY, Cpf1, C2c1, C2c2, C2C3, Argonaute, Cas12a, and Cas12b. One example of a nucleic acid programmable DNA-binding protein that has different PAM specificity than Cas9 is Clustered Regularly Interspaced Short Palindromic Repeats from Prevotella and Francisella 1 (Cpf1). Similar to Cas9, Cpf1 is also a class 2 CRISPR effector. It has been shown that Cpf1 mediates robust DNA interference with features distinct from Cas9. Cpf1 is a single RNA-guided endonuclease lacking tracrRNA, and it utilizes a T-rich protospacer-adjacent motif (TTN, TTTN, or YTN). Moreover, Cpf1 cleaves DNA via a staggered DNA double-stranded break. Out of 16 Cpf1-family proteins, two enzymes from Acidaminococcus and Lachnospiraceae are shown to have efficient genome-editing activity in human cells. Cpf1 proteins are known in the art and have been described previously, for example Yamano et al., “Crystal structure of Cpf1 in complex with guide RNA and target DNA.” Cell (165) 2016, p. 949-962; the entire contents of which is hereby incorporated by reference. The state of the art may also now refer to Cpf1 enzymes as Cas12a.

[0315] In still other embodiments, the Cas protein may include any CRISPR associated protein, including but not limited to, Cas12a, Cas12b, Cas1, Cas1B, Cas2, Cas3, Cas4, Cas5, Cas6, Cas7, Cas8, Cas9 (also known as Csn1 and Csx12), Cas10, Csy1, Csy2, Csy3, Cse1, Cse2, Csc1, Csc2, Csa5, Csn2, Csm2, Csm3, Csm4, Csm5, Csm6, Cmr1, Cmr3, Cmr4, Cmr5, Cmr6, Csb1, Csb2, Csb3, Csx17, Csx14, Csx10, Csx16, CsaX, Csx3, Csx1, Csx15, Csf1, Csf2, Csf3, Csf4, homologs thereof, or modified versions thereof, and preferably comprising a nickase mutation (e.g., a mutation corresponding to the D10A mutation of the wild type Cas9 polypeptide of SEQ ID NO: 59).

[0316] In various other embodiments, the napDNAbp can be any of the following proteins: a Cas9, a Cpf1, a CasX, a CasY, a C2c1, a C2c2, a C2c, a GeoCas9, a CjCas9, a Cas12a, a Cas12b, a Cas12g, a Cas12h, a Cas12i, a Cas13b, a Cas13c, a Cas13d, a Cas14, a Csn2, an xCas9, an SpCas9-NG, a circularly permuted Cas9, or an Argonaute (Ago) domain, or a variant thereof.

[0317] Exemplary Cas9 equivalent protein sequences can include the following:

| Description | Sequence |
|---|---|
| AsCas12a | MTQFEGFTNLYQVSKTLRFELIPQGKTLKH |
| (previously | IQEQGFIEEDKARNDHYKELKPIIDRIYKT |
| known as | YADQCLQLVQLDWENLSAAIDSYRKEKTEE |
| Cpf1) | TRNALIEEQATYRNAIHDYFIGRTDNLTDA |
| Acidaminococcus | INKRHAEIYKGLFKAELFNGKVLKQLGTVT |
| sp. | TTEHENALLRSFDKFTTYFSGFYENRKNVF |
| (strain | SAEDISTAIPHRIVQDNFPKFKENCHIFTR |
| BV3L6) | LITAVPSLREHFENVKKAIGIFVSTSIEEV |
| UniProtKB | FSFPFYNQLLTQTQIDLYNQLLGGISREAG |
| U2UMQ6 | TEKIKGLNEVLNLAIQKNDETAHIIASLPH |
| | RFIPLFKQILSDRNTLSFILEEFKSDEEVI |
| | QSFCKYKTLLRNENVLETAEALFNELNSID |
| | LTHIFISHKKLETISSALCDHWDTLRNALY |
| | ERRISELTGKITKSAKEKVQRSLKHEDINL |
| | QEIISAAGKELSEAFKQKTSEILSHAHAAL |
| | DQPLPTTLKKQEEKEILKSQLDSLLGLYHL |
| | LDWFAVDESNEVDPEFSARLTGIKLEMEPS |
| | LSFYNKARNYATKKPYSVEKFKLNFQMPTL |
| | ASGWDVNKEKNNGAILFVKNGLYYLGIMPK |
| | QKGRYKALSFEPTEKTSEGFDKMYYDYFPD |
| | AAKMIPKCSTQLKAVTAHFQTHTTPILLSN |
| | NFIEPLEITKEIYDLNNPEKEPKKFQTAYA |
| | KKTGDQKGYREALCKWIDFTRDFLSKYTKT |
| | TSIDLSSLRPSSQYKDLGEYYAELNPLLYH |
| | ISFQRIAEKEIMDAVETGKLYLFQIYNKDF |
| | AKGHHGKPNLHTLYWTGLFSPENLAKTSIK |
| | LNGQAELFYRPKSRMKRMAHRLGEKMLNKK |
| | LKDQKTPIPDTLYQELYDYVNHRLSHDLSD |
| | EARALLPNVITKEVSHEIIKDRRFTSDKFF |
| | FHVPITLNYQAANSPSKFNQRVNAYLKEHP |
| | ETPIIGIDRGERNLIYITVIDSTGKILEQR |
| | SLNTIQQFDYQKKLDNREKERVAARQAWSV |
| | VGTIKDLKQGYLSQVIHEIVDLMIHYQAVV |
| | VLENLNFGFKSKRTGIAEKAVYQQFEKMLI |
| | DKLNCLVLKDYPAEKVGGVLNPYQLTDQFT |
| | SFAKMGTQSGFLFYVPAPYTSKIDPLTGFV |
| | DPFVWKTIKNHESRKHFLEGFDFLHYDVKT |
| | GDFILHFKMNRNLSFQRGLPGFMPAWDIVF |
| | EKNETQFDAKGTPFIAGKRIVPVIENHRFT |
| | GRYRDLYPANELIALLEEKGIVFRDGSNIL |
| | PKLLENDDSHAIDTMVALIRSVLQMRNSNA |
| | ATGEDYINSPVRDLNGVCFDSRFQNPEWPM |
| | DADANGAYHIALKGQLLLNHLKESKDLKLQ |
| | NGISNQDWLAYIQELRN |
| | (SEQ ID NO: 102) |
| AsCas12a | MTQFEGFTNLYQVSKTLRFELIPQGKTLKH |
| nickase | IQEQGFIEEDKARNDHYKELKPIIDRIYKT |
| (e.g., | YADQCLQLVQLDWENLSAAIDSYRKEKTEE |
| R1226A) | TRNALIEEQATYRNAIHDYFIGRTDNLTDA |
| | INKRHAEIYKGLFKAELFNGKVLKQLGTVT |
| | TTEHENALLRSFDKFTTYFSGFYENRKNVF |
| | SAEDISTAIPHRIVQDNFPKFKENCHIFTR |
| | LITAVPSLREHFENVKKAIGIFVSTSIEEV |
| | FSFPFYNQLLTQTQIDLYNQLLGGISREAG |
| | TEKIKGLNEVLNLAIQKNDETAHIIASLPH |
| | RFIPLFKQILSDRNTLSFILEEFKSDEEVI |
| | QSFCKYKTLLRNENVLETAEALFNELNSID |
| | LTHIFISHKKLETISSALCDHWDTLRNALY |
| | ERRISELTGKITKSAKEKVQRSLKHEDINL |
| | QEIISAAGKELSEAFKQKTSEILSHAHAAL |
| | DQPLPTTLKKQEEKEILKSQLDSLLGLYHL |
| | LDWFAVDESNEVDPEFSARLTGIKLEMEPS |
| | LSFYNKARNYATKKPYSVEKFKLNFQMPTL |
| | ASGWDVNKEKNNGAILFVKNGLYYLGIMPK |
| | QKGRYKALSFEPTEKTSEGFDKMYYDYFPD |
| | AAKMIPKCSTQLKAVTAHFQTHTTPILLSN |
| | NFIEPLEITKEIYDLNNPEKEPKKFQTAYA |
| | KKTGDQKGYREALCKWIDFTRDFLSKYTKT |
| | TSIDLSSLRPSSQYKDLGEYYAELNPLLYH |
| | ISFQRIAEKEIMDAVETGKLYLFQIYNKDF |
| | AKGHHGKPNLHTLYWTGLFSPENLAKTSIK |
| | LNGQAELFYRPKSRMKRMAHRLGEKMLNKK |
| | LKDQKTPIPDTLYQELYDYVNHRLSHDLSD |
| | EARALLPNVITKEVSHEIIKDRRFTSDKFF |
| | FHVPITLNYQAANSPSKFNQRVNAYLKEHP |
| | ETPIIGIDRGERNLIYITVIDSTGKILEQR |
| | SLNTIQQFDYQKKLDNREKERVAARQAWSV |
| | VGTIKDLKQGYLSQVIHEIVDLMIHYQAVV |
| | VLENLNFGFKSKRTGIAEKAVYQQFEKMLI |
| | DKLNCLVLKDYPAEKVGGVLNPYQLTDQFT |
| | SFAKMGTQSGFLFYVPAPYTSKIDPLTGFV |
| | DPFVWKTIKNHESRKHFLEGFDFLHYDVKT |
| | GDFILHFKMNRNLSFQRGLPGFMPAWDIVF |
| | EKNETQFDAKGTPFIAGKRIVPVIENHRFT |
| | GRYRDLYPANELIALLEEKGIVFRDGSNIL |
| | PKLLENDDSHAIDTMVALIRSVLQMANSNA |
| | ATGEDYINSPVRDLNGVCFDSRFQNPEWPM |
| | DADANGAYHIALKGQLLLNHLKESKDLKLQ |
| | NGISNQDWLAYIQELRN |
| | (SEQ ID NO: 103) |
| LbCas12a | MNYKTGLEDFIGKESLSKTLRNALIPTEST |
| (previously | KIHMEEMGVIRDDELRAEKQQELKEIMDDY |
| known as | YRTFIEEKLGQIQGIQWNSLFQKMEETMED |
| Cpf1) | ISVRKDLDKIQNEKRKEICCYFTSDKRFKD |
| Lachnospiraceae | LFNAKLITDILPNFIKDNKEYTEEEKAEKE |
| bacterium | QTRVLFQRFATAFTNYFNQRRNNFSEDNIS |
| GAM79 | TAISFRIVNENSEIHLQNMRAFQRIEQQYP |
| Ref Seq. | EEVCGMEEEYKDMLQEWQMKHIYSVDFYDR |
| WP_ | ELTQPGIEYYNGICGKINEHMNQFCQKNRI |
| 119623382.1 | NKNDFRMKKLHKQILCKKSSYYEIPFRFES |
| | DQEVYDALNEFIKTMKKKEIIRRCVHLGQE |
| | CDDYDLGKIYISSNKYEQISNALYGSWDTI |
| | RKCIKEEYMDALPGKGEKKEEKAEAAAKKE |
| | EYRSIADIDKIISLYGSEMDRTISAKKCIT |
| | EICDMAGQISIDPLVCNSDIKLLQNKEKTT |
| | EIKTILDSFLHVYQWGQTFIVSDIIEKDSY |
| | FYSELEDVLEDFEGITTLYNHVRSYVTQKP |
| | YSTVKFKLHFGSPTLANGWSQSKEYDNNAI |
| | LLMRDQKFYLGIFNVRNKPDKQIIKGHEKE |
| | EKGDYKKMIYNLLPGPSKMLPKVFITSRSG |
| | QETYKPSKHILDGYNEKRHIKSSPKFDLGY |
| | CWDLIDYYKECIHKHPDWKNYDFHFSDTKD |
| | YEDISGFYREVEMQGYQIKWTYISADEIQK |
| | LDEKGQIFLFQIYNKDFSVHSTGKDNLHTM |
| | YLKNLFSEENLKDIVLKLNGEAELFFRKAS |
| | IKTPIVHKKGSVLVNRSYTQTVGNKEIRVS |
| | IPEEYYTEIYNYLNHIGKGKLSSEAQRYLD |
| | EGKIKSFTATKDIVKNYRYCCDHYFLHLPI |
| | TINFKAKSDVAVNERTLAYIAKKEDIHIIG |
| | IDRGERNLLYISVVDVHGNIREQRSFNIVN |
| | GYDYQQKLKDREKSRDAARKNWEEIEKIKE |
| | LKEGYLSMVIHYIAQLVVKYNAVVAMEDLN |
| | YGFKTGRFKVERQVYQKFETMLIEKLHYLV |
| | FKDREVCEEGGVLRGYQLTYIPESLKKVGK |
| | QCGFIFYVPAGYTSKIDPTTGFVNLFSFKN |
| | LTNRESRQDFVGKFDEIRYDRDKKMFEFSF |
| | DYNNYIKKGTILASTKWKVYTNGTRLKRIV |
| | VNGKYTSQSMEVELTDAMEKMLQRAGIEYH |
| | DGKDLKGQIVEKGIEAEIIDIFRLTVQMRN |
| | SRSESEDREYDRLISPVLNDKGEFFDTATA |
| | DKTLPQDADANGAYCIALKGLYEVKQIKEN |
| | WKENEQFPRNKLVQDNKTWFDFMQKKRYL |
| | (SEQ ID NO: 104) |
| PcCas12a- | MAKNFEDFKRLYSLSKTLRFEAKPIGATLD |
| previously | NIVKSGLLDEDEHRAASYVKVKKLIDEYHK |
| known at | VFIDRVLDDGCLPLENKGNNNSLAEYYESY |
| Cpf1 | VSRAQDEDAKKKFKEIQQNLRSVIAKKLTE |
| Prevotella | DKAYANLFGNKLIESYKDKEDKKKIIDSDL |
| copri | IQFINTAESTQLDSMSQDEAKELVKEFWGF |
| Ref Seq. | VTYFYGFFDNRKNMYTAEEKSTGIAYRLVN |
| WP_ | ENLPKFIDNIEAFNRAITRPEIQENMGVLY |
| 119227726.1 | SDFSEYLNVESIQEMFQLDYYNMLLTQKQI |
| | DVYNAIIGGKTDDEHDVKIKGINEYINLYN |
| | QQHKDDKLPKLKALFKQILSDRNAISWLPE |
| | EFNSDQEVLNAIKDCYERLAENVLGDKVLK |
| | SLLGSLADYSLDGIFIRNDLQLTDISQKMF |
| | GNWGVIQNAIMQNIKRVAPARKHKESEEDY |
| | EKRIAGIFKKADSFSISYINDCLNEADPNN |
| | AYFVENYFATFGAVNTPTMQRENLFALVQN |
| | AYTEVAALLHSDYPTVKHLAQDKANVSKIK |
| | ALLDAIKSLQHFVKPLLGKGDESDKDERFY |
| | GELASLWAELDTVTPLYNMIRNYMTRKPYS |
| | QKKIKLNFENPQLLGGWDANKEKDYATIIL |
| | RRNGLYYLAIMDKDSRKLLGKAMPSDGECY |
| | EKMVYKFFKDVTTMIPKCSTQLKDVQAYFK |
| | VNTDDYVLNSKAFNKPLTITKEVFDLNNVL |
| | YGKYKKFQKGYLTATGDNVGYTHAVNVWIK |
| | FCMDFLNSYDSTCIYDFSSLKPESYLSLDA |
| | FYQDANLLLYKLSFARASVSYINQLVEEGK |
| | MYLFQIYNKDFSEYSKGTPNMHTLYWKALF |
| | DERNLADVVYKLNGQAEMFYRKKSIENTHP |
| | THPANHPILNKNKDNKKKESLFDYDLIKDR |
| | RYTVDKFMFHVPITMNFKSVGSENINQDVK |
| | AYLRHADDMHIIGIDRGERHLLYLVVIDLQ |
| | GNIKEQYSLNEIVNEYNGNTYHTNYHDLLD |
| | VREEERLKARQSWQTIENIKELKEGYLSQV |
| | IHKITQLMVRYHAIVVLEDLSKGFMRSRQK |
| | VEKQVYQKFEKMLIDKLNYLVDKKTDVSTP |
| | GGLLNAYQLTCKSDSSQKLGKQSGFLFYIP |
| | AWNTSKIDPVTGFVNLLDTHSLNSKEKIKA |
| | FFSKFDAIRYNKDKKWFEFNLDYDKFGKKA |
| | EDTRTKWTLCTRGMRIDTFRNKEKNSQWDN |
| | QEVDLTTEMKSLLEHYYIDIHGNLKDAISA |
| | QTDKAFFTGLLHILKLTLQMRNSITGTETD |
| | YLVSPVADENGIFYDSRSCGNQLPENADAN |
| | GAYNIARKGLMLIEQIKNAEDLNNVKFDIS |
| | NKAWLNFAQQKPYKNG |
| | (SEQ ID NO: 105) |
| ErCas12a- | MFSAKLISDILPEFVIHNNNYSASEKEEKT |
| previously | QVIKLESRFATSFKDYFKNRANCESANDIS |
| known at | SSSCHRIVNDNAEIFFSNALVYRRIVKNLS |
| Cpf1 | NDDINKISGDMKDSLKEMSLEEIYSYEKYG |
| Eubacterium | EFITQEGISFYNDICGKVNLFMNLYCQKNK |
| rectale | ENKNLYKLRKLHKQILCIADTSYEVPYKFE |
| Ref Seq. | SDEEVYQSVNGFLDNISSKHIVERLRKIGE |
| WP_ | NYNGYNLDKIYIVSKFYESVSQKTYRDWET |
| 119223642.1 | INTALEIHYNNILPGNGKSKADKVKKAVKN |
| | DLQKSITEINELVSNYKLCPDDNIKAETYI |
| | HEISHILNNFEAQELKYNPEIHLVESELKA |
| | SELKNVLDVIMNAFHWCSVFMTEELVDKDN |
| | NFYAELEEIYDEIYPVISLYNLVRNYVTQK |
| | PYSTKKIKLNFGIPTLADGWSKSKEYSNNA |
| | IILMRDNLYYLGIFNAKNKPDKKIIEGNTS |
| | ENKGDYKKMIYNLLPGPNKMIPKVFLSSKT |
| | GVETYKPSAYILEGYKQNKHLKSSKDFDIT |
| | FCHDLIDYFKNCIAIHPEWKNFGFDFSDTS |
| | TYEDISGFYREVELQGYKIDWTYISEKDID |
| | LLQEKGQLYLFQIYNKDFSKKSSGNDNLHT |
| | MYLKNLFSEENLKDIVLKLNGEAEIFFRKS |
| | SIKNPIIHKKGSILVNRTYEAEEKDQFGNI |
| | QIVRKTIPENIYQELYKYFNDKSDKELSDE |
| | AAKLKNVVGHHEAATNIVKDYRYTYDKYFL |
| | HMPITINFKANKTSFINDRILQYIAKEKDL |
| | HVIGIDRGERNLIYVSVIDTCGNIVEQKSF |
| | NIVNGYDYQIKLKQQEGARQIARKEWKEIG |
| | KIKEIKEGYLSLVIHEISKMVIKYNAIIAM |
| | EDLSYGFKKGRFKVERQVYQKFETMLINKL |
| | NYLVFKDISITENGGLLKGYQLTYIPDKLK |
| | NVGHQCGCIFYVPAAYTSKIDPTTGFVNIF |
| | KFKDLTVDAKREFIKKFDSIRYDSDKNLFC |
| | FTFDYNNFITQNTVMSKSSWSVYTYGVRIK |
| | RRFVNGRESNESDTIDITKDMEKTLEMTDI |
| | NWRDGHDLRQDIIDYEIVQHIFEIFKLTVQ |
| | MRNSLSELEDRDYDRLISPVLNENNIFYDS |
| | AKAGDALPKDADANGAYCIALKGLYEIKQI |
| | TENWKEDGKFSRDKLKISNKDWFDFIQNKR |
| | YL |
| | (SEQ ID NO: 106) |
| CsCas12a- | PSKMLPKVFITSRSGQETYKPSKHILDGYN |
| previously | EKRHIKSSPKFDLGYCWDLIDYYKECIHKM |
| known at | NYKTGLEDFIGKESLSKTLRNALIPTESTK |
| Cpf1 | IHMEEMGVIRDDELRAEKQQELKEIMDDYY |
| Clostridium | RAFIEEKLGQIQGIQWNSLFQKMEETMEDI |
| sp. AF34- | SVRKDLDKIQNEKRKEICCYFTSDKRFKDL |
| 10BH | FNAKLITDILPNFIKDNKEYTEEEKAEKEQ |
| Ref Seq. | TRVLFQRFATAFTNYFNQRRNNFSEDNIST |
| WP_ | AISFRIVNENSEIHLQNMRAFQRIEQQYPE |
| 118538418.1 | EVCGMEEEYKDMLQEWQMKHIYLVDFYDRV |
| | LTQPGIEYYNGICGKINEHMNQFCQKNRIN |
| | KNDFRMKKLHKQILCKKSSYYEIPFRFESD |
| | QEVYDALNEFIKTMKEKEIICRCVHLGQKC |
| | DDYDLGKIYISSNKYEQISNALYGSWDTIR |
| | KCIKEEYMDALPGKGEKKEEKAEAAAKKEE |
| | YRSIADIDKIISLYGSEMDRTISAKKCITE |
| | ICDMAGQISTDPLVCNSDIKLLQNKEKTTE |
| | IKTILDSFLHVYQWGQTFIVSDIIEKDSYF |
| | YSELEDVLEDFEGITTLYNHVRSYVTQKPY |
| | STVKFKLHFGSPTLANGWSQSKEYDNNAIL |
| | LMRDQKFYLGIFNVRNKPDKQIIKGHEKEE |
| | KGDYKKMIYNLLPGHPDWKNYDFHFSDTKD |
| | YEDISGFYREVEMQGYQIKWTYISADEIQK |
| | LDEKGQIFLFQIYNKDFSVHSTGKDNLHTM |
| | YLKNLFSEENLKDIVLKLNGEAELFFRKAS |
| | IKTPVVHKKGSVLVNRSYTQTVGDKEIRVS |
| | IPEEYYTEIYNYLNHIGRGKLSTEAQRYLE |
| | ERKIKSFTATKDIVKNYRYCCDHYFLHLPI |
| | TINFKAKSDIAVNERTLAYIAKKEDIHIIG |
| | IDRGERNLLYISVVDVHGNIREQRSFNIVN |
| | GYDYQQKLKDREKSRDAARKNWEEIEKIKE |
| | LKEGYLSMVIHYIAQLVVKYNAVVAMEDLN |
| | YGFKTGRFKVERQVYQKFETMLIEKLHYLV |
| | FKDREVCEEGGVLRGYQLTYIPESLKKVGK |
| | QCGFIFYVPAGYTSKIDPTTGFVNLFSFKN |
| | LTNRESRQDFVGKFDEIRYDRDKKMFEFSF |
| | DYNNYIKKGTMLASTKWKVYTNGTRLKRIV |
| | VNGKYTSQSMEVELTDAMEKMLQRAGIEYH |
| | DGKDLKGQIVEKGIEAEIIDIFRLTVQMRN |
| | SRSESEDREYDRLISPVLNDKGEFFDTATA |
| | DKTLPQDADANGAYCIALKGLYEVKQIKEN |
| | WKENEQFPRNKLVQDNKTWFDFMQKKRYL |
| | (SEQ ID NO: 107) |
| BhCas12b | MATRSFILKIEPNEEVKKGLWKTHEVLNHG |
| Bacillus | IAYYMNILKLIRQEAIYEHHEQDPKNPKKV |
| hisashii | SKAEIQAELWDFVLKMQKCNSFTHEVDKDE |
| Ref Seq. | VFNILRELYEELVPSSVEKKGEANQLSNKF |
| WP_ | LYPLVDPNSQSGKGTASSGRKPRWYNLKIA |
| 095142515.1 | GDPSWEEEKKKWEEDKKKDPLAKILGKLAE |
| | YGLIPLFIPYTDSNEPIVKEIKWMEKSRNQ |
| | SVRRLDKDMFIQALERFLSWESWNLKVKEE |
| | YEKVEKEYKTLEERIKEDIQALKALEQYEK |
| | ERQEQLLRDTLNTNEYRLSKRGLRGWREII |
| | QKWLKMDENEPSEKYLEVFKDYQRKHPREA |
| | GDYSVYEFLSKKENHFIWRNHPEYPYLYAT |
| | FCEIDKKKKDAKQQATFTLADPINHPLWVR |
| | FEERSGSNLNKYRILTEQLHTEKLKKKLTV |
| | QLDRLIYPTESGGWEEKGKVDIVLLPSRQF |
| | YNQIFLDIEEKGKHAFTYKDESIKFPLKGT |
| | LGGARVQFDRDHLRRYPHKVESGNVGRIYF |
| | NMTVNIEPTESPVSKSLKIHRDDFPKVVNF |
| | KPKELTEWIKDSKGKKLKSGIESLEIGLRV |
| | MSIDLGQRQAAAASIFEVVDQKPDIEGKLF |
| | FPIKGTELYAVHRASFNIKLPGETLVKSRE |
| | VLRKAREDNLKLMNQKLNFLRNVLHFQQFE |
| | DITEREKRVTKWISRQENSDVPLVYQDELI |
| | QIRELMYKPYKDWVAFLKQLHKRLEVEIGK |
| | EVKHWRKSLSDGRKGLYGISLKNIDEIDRT |
| | RKFLLRWSLRPTEPGEVRRLEPGQRFAIDQ |
| | LNHLNALKEDRLKKMANTIIMHALGYCYDV |
| | RKKKWQAKNPACQIILFEDLSNYNPYEERS |
| | RFENSKLMKWSRREIPRQVALQGEIYGLQV |
| | GEVGAQFSSRFHAKTGSPGIRCSVVTKEKL |
| | QDNRFFKNLQREGRLTLDKIAVLKEGDLYP |
| | DKGGEKFISLSKDRKCVTTHADINAAQNLQ |
| | KRFWTRTHGFYKVYCKAYQVDGQTVYIPES |
| | KDQKQKIIEEFGEGYFILKDGVYEWVNAGK |
| | LKIKKGSSKQSSSELVDSDILKDSFDLASE |
| | LKGEKLMLYRDPSGNVFPSDKWMAAGVFFG |
| | KLERILISKLTNQYSISTIEDDSSKQSM |
| | (SEQ ID NO: 101) |
| ThCas12b | MSEKTTQRAYTLRLNRASGECAVCQNNSCD |
| Thermomonas | CWHDALWATHKAVNRGAKAFGDWLLTLRGG |
| hydrothermalis | LCHTLVEMEVPAKGNNPPQRPTDQERRDRR |
| Ref Seq. | VLLALSWLSVEDEHGAPKEFIVATGRDSAD |
| WP_ | DRAKKVEEKLREILEKRDFQEHEIDAWLQD |
| 072754838 | CGPSLKAHIREDAVWVNRRALFDAAVERIK |
| | TLTWEEAWDFLEPFFGTQYFAGIGDGKDKD |
| | DAEGPARQGEKAKDLVQKAGQWLSARFGIG |
| | TGADFMSMAEAYEKIAKWASQAQNGDNGKA |
| | TIEKLACALRPSEPPTLDTVLKCISGPGHK |
| | SATREYLKTLDKKSTVTQEDLNQLRKLADE |
| | DARNCRKKVGKKGKKPWADEVLKDVENSCE |
| | LTYLQDNSPARHREFSVMLDHAARRVSMAH |
| | SWIKKAEQRRRQFESDAQKLKNLQERAPSA |
| | VEWLDRFCESRSMTTGANTGSGYRIRKRAI |
| | EGWSYVVQAWAEASCDTEDKRIAAARKVQA |
| | DPEIEKFGDIQLFEALAADEAICVWRDQEG |
| | TQNPSILIDYVTGKTAEHNQKRFKVPAYRH |
| | PDELRHPVFCDFGNSRWSIQFAIHKEIRDR |
| | DKGAKQDTRQLQNRHGLKMRLWNGRSMTDV |
| | NLHWSSKRLTADLALDQNPNPNPTEVTRAD |
| | RLGRAASSAFDHVKIKNVFNEKEWNGRLQA |
| | PRAELDRIAKLEEQGKTEQAEKLRKRLRWY |
| | VSFSPCLSPSGPFIVYAGQHNIQPKRSGQY |
| | APHAQANKGRARLAQLILSRLPDLRILSVD |
| | LGHRFAAACAVWETLSSDAFRREIQGLNVL |
| | AGGSGEGDLFLHVEMTGDDGKRRTVVYRRI |
| | GPDQLLDNTPHPAPWARLDRQFLIKLQGED |
| | EGVREASNEELWTVHKLEVEVGRTVPLIDR |
| | MVRSGFGKTEKQKERLKKLRELGWISAMPN |
| | EPSAETDEKEGEIRSISRSVDELMSSALGT |
| | LRLALKRHGNRARIAFAMTADYKPMPGGQK |
| | YYFHEAKEASKNDDETKRRDNQIEFLQDAL |
| | SLWHDLFSSPDWEDNEAKKLWQNHIATLPN |
| | YQTPEEISAELKRVERNKKRKENRDKLRTA |
| | AKALAENDQLRQHLHDTWKERWESDDQQWK |
| | ERLRSLKDWIFPRGKAEDNPSIRHVGGLSI |
| | TRINTISGLYQILKAFKMRPEPDDLRKNIP |
| | QKGDDELENFNRRLLEARDRLREQRVKQLA |
| | SRIIEAALGVGRIKIPKNGKLPKRPRTTVD |
| | TPCHAVVIESLKTYRPDDLRTRRENRQLMQ |
| | WSSAKVRKYLKEGCELYGLHFLEVPANYTS |
| | RQCSRTGLPGIRCDDVPTGDFLKAPWWRRA |
| | INTAREKNGGDAKDRFLVDLYDHLNNLQSK |
| | GEALPATVRVPRQGGNLFIAGAQLDDTNKE |
| | RRAIQADLNAAANIGLRALLDPDWRGRWWY |
| | VPCKDGTSEPALDRIEGSTAFNDVRSLPTG |
| | DNSSRRAPREIENLWRDPSGDSLESGTWSP |
| | TRAYWDTVQSRVIELLRRHAGLPTS |
| | (SEQ ID NO: 108) |
| LsCas12b | MSIRSFKLKLKTKSGVNAEQLRRGLWRTHQ |
| Laceyella | LINDGIAYYMNWLVLLRQEDLFIRNKETNE |
| sacchari | IEKRSKEEIQAVLLERVHKQQQRNQWSGEV |
| WP_1322218 | DEQTLLQALRQLYEEIVPSVIGKSGNASLK |
| 94.1 | ARFFLGPLVDPNNKTTKDVSKSGPTPKWKK |
| | MKDAGDPNWVQEYEKYMAERQTLVRLEEMG |
| | LIPLFPMYTDEVGDIHWLPQASGYTRTWDR |
| | DMFQQAIERLLSWESWNRRVRERRAQFEKK |
| | THDFASRFSESDVQWMNKLREYEAQQEKSL |
| | EENAFAPNEPYALTKKALRGWERVYHSWMR |
| | LDSAASEEAYWQEVATCQTAMRGEFGDPAI |
| | YQFLAQKENHDIWRGYPERVIDFAELNHLQ |
| | RELRRAKEDATFTLPDSVDHPLWVRYEAPG |
| | GTNIHGYDLVQDTKRNLTLILDKFILPDEN |
| | GSWHEVKKVPFSLAKSKQFHRQVWLQEEQK |
| | QKKREVVFYDYSTNLPHLGTLAGAKLQWDR |
| | NFLNKRTQQQIEETGEIGKVFFNISVDVRP |
| | AVEVKNGRLQNGLGKALTVLTHPDGTKIVT |
| | GWKAEQLEKWVGESGRVSSLGLDSLSEGLR |
| | VMSIDLGQRTSATVSVFEITKEAPDNPYKF |
| | FYQLEGTEMFAVHQRSFLLALPGENPPQKI |
| | KQMREIRWKERNRIKQQVDQLSAILRLHKK |
| | VNEDERIQAIDKLLQKVASWQLNEEIATAW |
| | NQALSQLYSKAKENDLQWNQAIKNAHHQLE |
| | PVVGKQISLWRKDLSTGRQGIAGLSLWSIE |
| | ELEATKKLLTRWSKRSREPGVVKRIERFET |
| | FAKQIQHHINQVKENRLKQLANLIVMTALG |
| | YKYDQEQKKWIEVYPACQVVLFENLRSYRF |
| | SFERSRRENKKLMEWSHRSIPKLVQMQGEL |
| | FGLQVADVYAAYSSRYHGRTGAPGIRCHAL |
| | TEADLRNETNIIHELIEAGFIKEEHRPYLQ |
| | QGDLVPWSGGELFATLQKPYDNPRILTLHA |
| | DINAAQNIQKRFWHPSMWFRVNCESVMEGE |
| | IVTYVPKNKTVHKKQGKTFRFVKVEGSDVY |
| | EWAKWSKNRNKNTFSSITERKPPSSMILFR |
| | DPSGTFFKEQEWVEQKTFWGKVQSMIQAYM |
| | KKTIVQRMEE |
| | (SEQ ID NO: 109) |
| DtCas12b | MVLGRKDDTAELRRALWTTHEHVNLAVAEV |
| Dsulfonatronum | ERVLLRCRGRSYWTLDRRGDPVHVPESQVA |
| thiodismutans | EDALAMAREAQRRNGWPVVGEDEEILLALR |
| WP_0313864 | YLYEQIVPSCLLDDLGKPLKGDAQKIGTNY |
| 37 | AGPLFDSDTCRRDEGKDVACCGPFHEVAGK |
| | YLGALPEWATPISKQEFDGKDASHLRFKAT |
| | GGDDAFFRVSIEKANAWYEDPANQDALKNK |
| | AYNKDDWKKEKDKGISSWAVKYIQKQLQLG |
| | QDPRTEVRRKLWLELGLLPLFIPVFDKTMV |
| | GNLWNRLAVRLALAHLLSWESWNHRAVQDQ |
| | ALARAKRDELAALFLGMEDGFAGLREYELR |
| | RNESIKQHAFEPVDRPYVVSGRALRSWTRV |
| | REEWLRHGDTQESRKNICNRLQDRLRGKFG |
| | DPDVFHWLAEDGQEALWKERDCVTSFSLLN |
| | DADG |
| | LLEKRKGYALMTFADARLHPRWAMYEAPGG |
| | SNLRTYQIRKTENGLWADVVLLSPRNESAA |
| | VEEKTFNVRLAPSGQLSNVSFDQIQKGSKM |
| | VGRCRYQSANQQFEGLLGGAEILFDRKRIA |
| | NEQHGATDLASKPGHVWFKLTLDVRPQAPQ |
| | GWLDGKGRPALPPEAKHFKTALSNKSKFAD |
| | QVRPGLRVLSVDLGVRSFAACSVFELVRGG |
| | PDQGTYFPAADGRTVDDPEKLWAKHERSFK |
| | ITLPGENPSRKEEIARRAAMEELRSLNGDI |
| | RRLKAILRLSVLQEDDPRTEHLRLFMEAIV |
| | DDPAKSALNAELFKGFGDDRFRSTPDLWKQ |
| | HCHFFHDKAEKVVAERFSRWRTETRPKSSS |
| | WQDWRERRGYAGGKSYWAVTYLEAVRGLIL |
| | RWNMRGRTYGEVNRQDKKQFGTVASALLHH |
| | INQLKEDRIKTGADMIIQAARGFVPRKNGA |
| | GWVQVHEPCRLILFEDLARYRFRTDRSRRE |
| | NSRLMRWSHREIVNEVGMQGELYGLHVDTT |
| | EAGFSSRYLASSGAPGVRCRHLVEEDFHDG |
| | LPGMHLVGELDWLLPKDKDRTANEARRLLG |
| | GMVRPGMLVPWDGGELFATLNAASQLHVIH |
| | ADINAAQNLQRRFWGRCGEAIRIVCNQLSV |
| | DGSTRYEMAKAPKARLLGALQQLKNGDAPF |
| | HLTSIPNSQKPENSYVMTPTNAGKKYRAGP |
| | GEKSSGEEDELALDIVEQAEELAQGRKTFF |
| | RDPSGVFFAPDRWLPSEIYWSRIRRRIWQV |
| | TLERNSSGRQERAEMDEMPY |
| | (SEQ ID NO: 110) |

[0318] The base editors described herein may also comprise Cas12a/Cpf1 (dCpf1) variants that may be used as a guide nucleotide sequence-programmable DNA-binding protein domain. The Cas12a/Cpf1 protein has a RuvC-like endonuclease domain that is similar to the RuvC domain of Cas9 but does not have a HNH endonuclease domain, and the N-terminal of Cpf1 does not have the alfa-helical recognition lobe of Cas9. It was shown in Zetsche et al., Cell, 163, 759-771, 2015 (which is incorporated herein by reference) that, the RuvC-like domain of Cpf1 is responsible for cleaving both DNA strands and inactivation of the RuvC-like domain inactivates Cpf1 nuclease activity.

(8) Cas9 Equivalents with Expanded PAM Sequence

[0319] In some embodiments, the napDNAbp is a nucleic acid programmable DNA binding protein that does not require a canonical (NGG) PAM sequence. In some embodiments, the napDNAbp is an argonaute protein. One example of such a nucleic acid programmable DNA binding protein is an Argonaute protein from Natronobacterium gregoryi (NgAgo). NgAgo is a ssDNA-guided endonuclease. NgAgo binds 5′ phosphorylated ssDNA of ˜24 nucleotides (gDNA) to guide it to its target site and will make DNA double-strand breaks at the gDNA site. In contrast to Cas9, the NgAgo-gDNA system does not require a protospacer-adjacent motif (PAM). Using a nuclease inactive NgAgo (dNgAgo) can greatly expand the bases that may be targeted. The characterization and use of NgAgo have been described in Gao et al., Nat Biotechnol., 2016 July; 34(7):768-73. PubMed PMID: 27136078; Swarts et al., Nature. 507(7491) (2014):258-61; and Swarts et al., Nucleic Acids Res. 43(10) (2015):5120-9, each of which is incorporated herein by reference.

[0320] In some embodiments, the napDNAbp is a prokaryotic homolog of an Argonaute protein. Prokaryotic homologs of Argonaute proteins are known and have been described, for example, in Makarova K., et al., “Prokaryotic homologs of Argonaute proteins are predicted to function as key components of a novel system of defense against mobile genetic elements”, Biol Direct. 2009 Aug. 25; 4:29. doi: 10.1186/1745-6150-4-29, the entire contents of which is hereby incorporated by reference. In some embodiments, the napDNAbp is a Marinitoga piezophila Argunaute (MpAgo) protein. The CRISPR-associated Marinitoga piezophila Argunaute (MpAgo) protein cleaves single-stranded target sequences using 5′-phosphorylated guides. The 5′ guides are used by all known Argonautes. The crystal structure of an MpAgo-RNA complex shows a guide strand binding site comprising residues that block 5′ phosphate interactions. This data suggests the evolution of an Argonaute subclass with noncanonical specificity for a 5′-hydroxylated guide. See, e.g., Kaya et al., “A bacterial Argonaute with noncanonical guide RNA specificity”, Proc Natl Acad Sci USA. 2016 Apr. 12; 113(15):4057-62, the entire contents of which are hereby incorporated by reference). It should be appreciated that other argonaute proteins may be used, and are within the scope of this disclosure.

[0321] In some embodiments, the napDNAbp is a single effector of a microbial CRISPR-Cas system. Single effectors of microbial CRISPR-Cas systems include, without limitation, Cas9, Cpf1, C2c1, C2c2, and C2c3. Typically, microbial CRISPR-Cas systems are divided into Class 1 and Class 2 systems. Class 1 systems have multisubunit effector complexes, while Class 2 systems have a single protein effector. For example, Cas9 and Cpf1 are Class 2 effectors. In addition to Cas9 and Cpf1, three distinct Class 2 CRISPR-Cas systems (C2c1, C2c2, and C2c3) have been described by Shmakov et al., “Discovery and Functional Characterization of Diverse Class 2 CRISPR Cas Systems”, Mol. Cell, 2015 Nov. 5; 60(3): 385-397, the entire contents of which is hereby incorporated by reference. Effectors of two of the systems, C2c1 and C2c3, contain RuvC-like endonuclease domains related to Cpf1. A third system, C2c2 contains an effector with two predicated HEPN RNase domains. Production of mature CRISPR RNA is tracrRNA-independent, unlike production of CRISPR RNA by C2c1. C2c1 depends on both CRISPR RNA and tracrRNA for DNA cleavage. Bacterial C2c2 has been shown to possess a unique RNase activity for CRISPR RNA maturation distinct from its RNA-activated single-stranded RNA degradation activity. These RNase functions are different from each other and from the CRISPR RNA-processing behavior of Cpf1. See, e.g., East-Seletsky, et al., “Two distinct RNase activities of CRISPR-C2c2 enable guide-RNA processing and RNA detection”, Nature, 2016 Oct. 13; 538(7624):270-273, the entire contents of which are hereby incorporated by reference. In vitro biochemical analysis of C2c2 in Leptotrichia shahii has shown that C2c2 is guided by a single CRISPR RNA and can be programed to cleave ssRNA targets carrying complementary protospacers. Catalytic residues in the two conserved HEPN domains mediate cleavage. Mutations in the catalytic residues generate catalytically inactive RNA-binding proteins. See e.g., Abudayyeh et al., “C2c2 is a single-component programmable RNA-guided RNA-targeting CRISPR effector”, Science, 2016 Aug. 5; 353(6299), the entire contents of which are hereby incorporated by reference.

[0322] The crystal structure of Alicyclobaccillus acidoterrastris C2c1 (AacC2c1) has been reported in complex with a chimeric single-molecule guide RNA (sgRNA). See e.g., Liu et al., “C2c1-sgRNA Complex Structure Reveals RNA-Guided DNA Cleavage Mechanism”, Mol. Cell, 2017 Jan. 19; 65(2):310-322, the entire contents of which are hereby incorporated by reference. The crystal structure has also been reported in Alicyclobacillus acidoterrestris C2c1 bound to target DNAs as ternary complexes. See e.g., Yang et al., “PAM-dependent Target DNA Recognition and Cleavage by C2C1 CRISPR-Cas endonuclease”, Cell, 2016 Dec. 15; 167(7):1814-1828, the entire contents of which are hereby incorporated by reference. Catalytically competent conformations of AacC2c1, both with target and non-target DNA strands, have been captured independently positioned within a single RuvC catalytic pocket, with C2c1-mediated cleavage resulting in a staggered seven-nucleotide break of target DNA. Structural comparisons between C2c1 ternary complexes and previously identified Cas9 and Cpf1 counterparts demonstrate the diversity of mechanisms used by CRISPR-Cas9 systems.

[0323] In some embodiments, the napDNAbp may be a C2c1, a C2c2, or a C2c3 protein. In some embodiments, the napDNAbp is a C2c1 protein. In some embodiments, the napDNAbp is a C2c2 protein. In some embodiments, the napDNAbp is a C2c3 protein. In some embodiments, the napDNAbp comprises an amino acid sequence that is at least 85%, at least 90%, at least 91%, at least 92%, at least 93%, at least 94%, at least 95%, at least 96%, at least 97%, at least 98%, at least 99%, or at least 99.5% identical to a naturally-occurring C2c1, C2c2, or C2c3 protein. In some embodiments, the napDNAbp is a naturally-occurring C2c1, C2c2, or C2c3 protein.

[0324] Some aspects of the disclosure provide Cas9 domains that have different PAM specificities. Typically, Cas9 proteins, such as Cas9 from S. pyogenes (spCas9), require a canonical NGG PAM sequence to bind a particular nucleic acid region. This may limit the ability to edit desired bases within a genome. In some embodiments, the base editing fusion proteins provided herein may need to be placed at a precise location, for example where a target base is placed within a 4 base region (e.g., a “editing window”), which is approximately 15 bases upstream of the PAM. See Komor, A. C., et al., “Programmable editing of a target base in genomic DNA without double-stranded DNA cleavage” Nature 533, 420-424 (2016), the entire contents of which are hereby incorporated by reference. Accordingly, in some embodiments, any of the fusion proteins provided herein may contain a Cas9 domain that is capable of binding a nucleotide sequence that does not contain a canonical (e.g., NGG) PAM sequence. Cas9 domains that bind to non-canonical PAM sequences have been described in the art and would be apparent to the skilled artisan. For example, Cas9 domains that bind non-canonical PAM sequences have been described in Kleinstiver, B. P., et al., “Engineered CRISPR-Cas9 nucleases with altered PAM specificities” Nature 523, 481-485 (2015); and Kleinstiver, B. P., et al., “Broadening the targeting range of Staphylococcus aureus CRISPR-Cas9 by modifying PAM recognition” Nature Biotechnology 33, 1293-1298 (2015); the entire contents of each are hereby incorporated by reference.

[0325] For example, a napDNAbp domain with altered PAM specificity, such as a domain with at least 80%, at least 85%, at least 90%, at least 95%, or at least 99% sequence identity with wild type Francisella novicida Cpf1 (SEQ ID NO: 111) (D917, E1006, and D1255), which has the following amino acid sequence:

(SEQ ID NO: 111)
MSIYQEFVNKYSLSKTLRFELIPQGKTLENIKARGLILDDEKRAK
DYKKAKQIIDKYHQFFIEEILSSVCISEDLLQNYSDVYFKLKKSD
DDNLQKDFKSAKDTIKKQISEYIKDSEKFKNLFNQNLIDAKKGQE
SDLILWLKQSKDNGIELFKANSDITDIDEALEIIKSFKGWTTYFK
GFHENRKNVYSSNDIPTSIIYRIVDDNLPKFLENKAKYESLKDKA
PEAINYEQIKKDLAEELTFDIDYKTSEVNQRVFSLDEVFEIANFN
NYLNQSGITKFNTIIGGKFVNGENTKRKGINEYINLYSQQINDKT
LKKYKMSVLFKQILSDTESKSFVIDKLEDDSDVVTTMQSFYEQIA
AFKTVEEKSIKETLSLLFDDLKAQKLDLSKIYFKNDKSLTDLSQQ
VFDDYSVIGTAVLEYITQQIAPKNLDNPSKKEQELIAKKTEKAKY
LSLETIKLALEEFNKHRDIDKQCRFEEILANFAAIPMIFDEIAQN
KDNLAQISIKYQNQGKKDLLQASAEDDVKAIKDLLDQTNNLLHKL
KIFHISQSEDKANILDKDEHFYLVFEECYFELANIVPLYNKIRNY
ITQKPYSDEKFKLNFENSTLANGWDKNKEPDNTAILFIKDDKYYL
GVMNKKNNKIFDDKAIKENKGEGYKKIVYKLLPGANKMLPKVFFS
AKSIKFYNPSEDILRIRNHSTHTKNGSPQKGYEKFEFNIEDCRKF
IDFYKQSISKHPEWKDFGFRFSDTQRYNSIDEFYREVENQGYKLT
FENISESYIDSVVNQGKLYLFQIYNKDFSAYSKGRPNLHTLYWKA
LFDERNLQDVVYKLNGEAELFYRKQSIPKKITHPAKEAIANKNKD
NPKKESVFEYDLIKDKRFTEDKFFFHCPITINFKSSGANKFNDEI
NLLLKEKANDVHILSIDRGERHLAYYTLVDGKGNIIKQDTFNIIG
NDRMKTNYHDKLAAIEKDRDSARKDWKKINNIKEMKEGYLSQVVH
EIAKLVIEYNAIVVFEDLNFGFKRGRFKVEKQVYQKLEKMLIEKL
NYLVFKDNEFDKTGGVLRAYQLTAPFETFKKMGKQTGIIYYVPAG
FTSKICPVTGFVNQLYPKYESVSKSQEFFSKFDKICYNLDKGYFE
FSFDYKNFGDKAAKGKWTIASFGSRLINFRNSDKNHNWDTREVYP
TKELEKLLKDYSIEYGHGECIKAAICGESDKKFFAKLTSVLNTIL
QMRNSKTGTELDYLISPVADVNGNFFDSRQAPKNMPQDADANGAY
HIGLKGLMLLGRIKNNQEGKKLNLVIKNEEYFEFVQNRNN

[0326] An additional napDNAbp domain with altered PAM specificity, such as a domain having at least 80%, at least 85%, at least 90%, at least 95%, or at least 99% sequence identity with wild type Geobacillus thermodenitrificans Cas9 (SEQ ID NO: 77), which has the following amino acid sequence:

(SEQ ID NO: 77)
MKYKIGLDIGITSIGWAVINLDIPRIEDLGVRIFDRAENPKTGES
LALPRRLARSARRRLRRRKHRLERIRRLFVREGILTKEELNKLFE
KKHEIDVWQLRVEALDRKLNNDELARILLHLAKRRGFRSNRKSER
TNKENSTMLKHIEENQSILSSYRTVAEMVVKDPKFSLHKRNKEDN
YTNTVARDDLEREIKLIFAKQREYGNIVCTEAFEHEYISIWASQR
PFASKDDIEKKVGFCTFEPKEKRAPKATYTFQSFTVWEHINKLRL
VSPGGIRALTDDERRLIYKQAFHKNKITFHDVRTLLNLPDDTRFK
GLLYDRNTTLKENEKVRFLELGAYHKIRKAIDSVYGKGAAKSFRP
IDFDTFGYALTMFKDDTDIRSYLRNEYEQNGKRMENLADKVYDEE
LIEELLNLSFSKFGHLSLKALRNILPYMEQGEVYSTACERAGYTF
TGPKKKQKTVLLPNIPPIANPVVMRALTQARKVVNAIIKKYGSPV
SIHIELARELSQSFDERRKMQKEQEGNRKKNETAIRQLVEYGLTL
NPTGLDIVKFKLWSEQNGKCAYSLQPIEIERLLEPGYTEVDHVIP
YSRSLDDSYTNKVLVLTKENREKGNRTPAEYLGLGSERWQQFETF
VLTNKQFSKKKRDRLLRLHYDENEENEFKNRNLNDTRYISRFLAN
FIREHLKFADSDDKQKVYTVNGRITAHLRSRWNFNKNREESNLHH
AVDAAIVACTTPSDIARVTAFYQRREQNKELSKKTDPQFPQPWPH
FADELQARLSKNPKESIKALNLGNYDNEKLESLQPVFVSRMPKRS
ITGAAHQETLRRYIGIDERSGKIQTVVKKKLSEIQLDKTGHFPMY
GKESDPRTYEAIRQRLLEHNNDPKKAFQEPLYKPKKNGELGPIIR
TIKIIDTTNQVIPLNDGKTVAYNSNIVRVDVFEKDGKYYCVPIYT
IDMMKGILPNKAIEPNKPYSEWKEMTEDYTFRFSLYPNDLIRIEF
PREKTIKTAVGEEIKIKDLFAYYQTIDSSNGGLSLVSHDNNFSLR
SIGSRTLKRFEKYQVDVLGNIYKVRGEKRVGVASSSHSKAGETIR
PL

[0327] In some embodiments, the nucleic acid programmable DNA binding protein (napDNAbp) is a nucleic acid programmable DNA binding protein that does not require a canonical (NGG) PAM sequence. In some embodiments, the napDNAbp is an argonaute protein. One example of such a nucleic acid programmable DNA binding protein is an Argonaute protein from Natronobacterium gregoryi (NgAgo). NgAgo is a ssDNA-guided endonuclease. NgAgo binds 5′ phosphorylated ssDNA of ˜24 nucleotides (gDNA) to guide it to its target site and will make DNA double-strand breaks at the gDNA site. In contrast to Cas9, the NgAgo-gDNA system does not require a protospacer-adjacent motif (PAM). Using a nuclease inactive NgAgo (dNgAgo) can greatly expand the bases that may be targeted. The characterization and use of NgAgo have been described in Gao et al., Nat Biotechnol., 34(7): 768-73 (2016), PubMed PMID: 27136078; Swarts et al., Nature, 507(7491): 258-61 (2014); and Swarts et al., Nucleic Acids Res. 43(10) (2015): 5120-9, each of which is incorporated herein by reference. The sequence of Natronobacterium gregoryi Argonaute is provided in SEQ ID NO: 112.

[0328] The disclosed fusion proteins may comprise a napDNAbp domain having at least 80%, at least 85%, at least 90%, at least 95%, or at least 99% sequence identity with wild type Natronobacterium gregoryi Argonaute (SEQ ID NO: 112), which has the following amino acid sequence:

(SEQ ID NO: 112)
MTVIDLDSTTTADELTSGHTYDISVTLTGVYDNTDEQHPRMSLAF
EQDNGERRYITLWKNTTPKDVFTYDYATGSTYIFTNIDYEVKDGY
ENLTATYQTTVENATAQEVGTTDEDETFAGGEPLDHHLDDALNET
PDDAETESDSGHVMTSFASRDQLPEWTLHTYTLTATDGAKTDTEY
ARRTLAYTVRQELYTDHDAAPVATDGLMLLTPEPLGETPLDLDCG
VRVEADETRTLDYTTAKDRLLARELVEEGLKRSLWDDYLVRGIDE
VLSKEPVLTCDEFDLHERYDLSVEVGHSGRAYLHINFRHRFVPKL
TLADIDDDNIYPGLRVKTTYRPRRGHIVWGLRDECATDSLNTLGN
QSVVAYHRNNQTPINTDLLDAIEAADRRVVETRRQGHGDDAVSFP
QELLAVEPNTHQIKQFASDGFHQQARSKTRLSASRCSEKAQAFAE
RLDPVRLNGSTVEFSSEFFTGNNEQQLRLLYENGESVLTFRDGAR
GAHPDETFSKGIVNPPESFEVAVVLPEQQADTCKAQWDTMADLLN
QAGAPPTRSETVQYDAFSSPESISLNVAGAIDPSEVDAAFVVLPP
DQEGFADLASPTETYDELKKALANMGIYSQMAYFDRFRDAKIFYT
RNVALGLLAAAGGVAFTTEHAMPGDADMFIGIDVSRSYPEDGASG
QINIAATATAVYKDGTILGHSSTRPQLGEKLQSTDVRDIMKNAIL
GYQQVTGESPTHIVIHRDGFMNEDLDPATEFLNEQGVEYDIVEIR
KQPQTRLLAVSDVQYDTPVKSIAAINQNEPRATVATFGAPEYLAT
RDGGGLPRPIQIERVAGETDIETLTRQVYLLSQSHIQVHNSTARL
PITTAYADQASTHATKGYLVQTGAFESNVGFL

### (9) Cas9 Circular Permutants

[0329] In various embodiments, the base editors disclosed herein may comprise a circular permutant of Cas9.

[0330] The term “circularly permuted Cas9” or “circular permutant” of Cas9 or “CP-Cas9”) refers to any Cas9 protein, or variant thereof, that occurs or has been modify to engineered as a circular permutant variant, which means the N-terminus and the C-terminus of a Cas9 protein (e.g., a wild type Cas9 protein) have been topically rearranged. Such circularly permuted Cas9 proteins, or variants thereof, retain the ability to bind DNA when complexed with a guide RNA (gRNA). See, Oakes et al., “Protein Engineering of Cas9 for enhanced function,” Methods Enzymol, 2014, 546: 491-511 and Oakes et al., “CRISPR-Cas9 Circular Permutants as Programmable Scaffolds for Genome Modification,” Cell, Jan. 10, 2019, 176: 254-267, each of are incorporated herein by reference. The instant disclosure contemplates any previously known CP-Cas9 or use a new CP-Cas9 so long as the resulting circularly permuted protein retains the ability to bind DNA when complexed with a guide RNA (gRNA).

[0331] Any of the Cas9 proteins described herein, including any variant, ortholog, or naturally occurring Cas9 or equivalent thereof, may be reconfigured as a circular permutant variant.

[0332] In various embodiments, the circular permutants of Cas9 may have the following structure:

[0333] N-terminus-[original C-terminus]-[optional linker]-[original N-terminus]-C-terminus.

[0334] As an example, the present disclosure contemplates the following circular permutants of canonical S. pyogenes Cas9 (1368 amino acids of UniProtKB—Q99ZW2 (CAS9_STRP1) (numbering is based on the amino acid position in SEQ ID NO: 59)):
[0335] N-terminus-[1268-1368]-[optional linker]-[1-1267]-C-terminus;
[0336] N-terminus-[1168-1368]-[optional linker]-[1-1167]-C-terminus;
[0337] N-terminus-[1068-1368]-[optional linker]-[1-1067]-C-terminus;
[0338] N-terminus-[968-1368]-[optional linker]-[1-967]-C-terminus;
[0339] N-terminus-[868-1368]-[optional linker]-[1-867]-C-terminus;
[0340] N-terminus-[768-1368]-[optional linker]-[1-767]-C-terminus;
[0341] N-terminus-[668-1368]-[optional linker]-[1-667]-C-terminus;
[0342] N-terminus-[568-1368]-[optional linker]-[1-567]-C-terminus;
[0343] N-terminus-[468-1368]-[optional linker]-[1-467]-C-terminus;
[0344] N-terminus-[368-1368]-[optional linker]-[1-367]-C-terminus;
[0345] N-terminus-[268-1368]-[optional linker]-[1-267]-C-terminus;
[0346] N-terminus-[168-1368]-[optional linker]-[1-167]-C-terminus;
[0347] N-terminus-[68-1368]-[optional linker]-[1-67]-C-terminus; or
[0348] N-terminus-[10-1368]-[optional linker]-[1-9]-C-terminus, or the corresponding circular permutants of other Cas9 proteins (including other Cas9 orthologs, variants, etc).

[0349] In particular embodiments, the circular permuant Cas9 has the following structure (based on S. pyogenes Cas9 (1368 amino acids of UniProtKB—Q99ZW2 (CAS9_STRP1) (numbering is based on the amino acid position in SEQ ID NO: 59):
[0350] N-terminus-[102-1368]-[optional linker]-[1-101]-C-terminus;
[0351] N-terminus-[1028-1368]-[optional linker]-[1-1027]-C-terminus;
[0352] N-terminus-[1041-1368]-[optional linker]-[1-1043]-C-terminus;
[0353] N-terminus-[1249-1368]-[optional linker]-[1-1248]-C-terminus; or
[0354] N-terminus-[1300-1368]-[optional linker]-[1-1299]-C-terminus, or the corresponding circular permutants of other Cas9 proteins (including other Cas9 orthologs, variants, etc).

[0355] In still other embodiments, the circular permuant Cas9 has the following structure (based on S. pyogenes Cas9 (1368 amino acids of UniProtKB—Q99ZW2 (CAS9_STRP1) (numbering is based on the amino acid position in SEQ ID NO: 59):
[0356] N-terminus-[103-1368]-[optional linker]-[1-102]-C-terminus;
[0357] N-terminus-[1029-1368]-[optional linker]-[1-1028]-C-terminus;
[0358] N-terminus-[1042-1368]-[optional linker]-[1-1041]-C-terminus;
[0359] N-terminus-[1250-1368]-[optional linker]-[1-1249]-C-terminus; or
[0360] N-terminus-[1301-1368]-[optional linker]-[1-1300]-C-terminus, or the corresponding circular permutants of other Cas9 proteins (including other Cas9 orthologs, variants, etc).

[0361] In some embodiments, the circular permutant can be formed by linking a C-terminal fragment of a Cas9 to an N-terminal fragment of a Cas9, either directly or by using a linker, such as an amino acid linker. In some embodiments, The C-terminal fragment may correspond to the C-terminal 95% or more of the amino acids of a Cas9 (e.g., amino acids about 1300-1368), or the C-terminal 90%, 85%, 80%, 75%, 70%, 65%, 60%, 55%, 50%, 45%, 40%, 35%, 30%, 25%, 20%, 15%, 10%, or 5% or more of a Cas9 (e.g., any one of SEQ ID NOs: 59-99). The N-terminal portion may correspond to the N-terminal 95% or more of the amino acids of a Cas9 (e.g., amino acids about 1-1300), or the N-terminal 90%, 85%, 80%, 75%, 70%, 65%, 60%, 55%, 50%, 45%, 40%, 35%, 30%, 25%, 20%, 15%, 10%, or 5% or more of a Cas9 (e.g., of SEQ ID NO: 59-99).

[0362] In some embodiments, the circular permutant can be formed by linking a C-terminal fragment of a Cas9 to an N-terminal fragment of a Cas9, either directly or by using a linker, such as an amino acid linker. In some embodiments, the C-terminal fragment that is rearranged to the N-terminus, includes or corresponds to the C-terminal 30% or less of the amino acids of a Cas9 (e.g., amino acids 1012-1368 of SEQ ID NO: 59). In some embodiments, the C-terminal fragment that is rearranged to the N-terminus, includes or corresponds to the C-terminal 30%, 29%, 28%, 27%, 26%, 25%, 24%, 23%, 22%, 21%, 20%, 19%, 18%, 17%, 16%, 15%, 14%, 13%, 12%, 11%, 10%, 9%, 8%, 7%, 6%, 5%, 4%, 3%, 2%, or 1% of the amino acids of a Cas9 (e.g., the Cas9 of SEQ ID NO: 59). In some embodiments, the C-terminal fragment that is rearranged to the N-terminus, includes or corresponds to the C-terminal 410 residues or less of a Cas9 (e.g., the Cas9 of SEQ ID NO: 59). In some embodiments, the C-terminal portion that is rearranged to the N-terminus, includes or corresponds to the C-terminal 410, 400, 390, 380, 370, 360, 350, 340, 330, 320, 310, 300, 290, 280, 270, 260, 250, 240, 230, 220, 210, 200, 190, 180, 170, 160, 150, 140, 130, 120, 110, 100, 90, 80, 70, 60, 50, 40, 30, 20, or 10 residues of a Cas9 (e.g., the Cas9 of SEQ ID NO: 59). In some embodiments, the C-terminal portion that is rearranged to the N-terminus, includes or corresponds to the C-terminal 357, 341, 328, 120, or 69 residues of a Cas9 (e.g., the Cas9 of SEQ ID NO: 59).

[0363] In other embodiments, circular permutant Cas9 variants may be defined as a topological rearrangement of a Cas9 primary structure based on the following method, which is based on S. pyogenes Cas9 of SEQ ID NO: 59: (a) selecting a circular permutant (CP) site corresponding to an internal amino acid residue of the Cas9 primary structure, which dissects the original protein into two halves: an N-terminal region and a C-terminal region; (b) modifying the Cas9 protein sequence (e.g., by genetic engineering techniques) by moving the original C-terminal region (comprising the CP site amino acid) to precede the original N-terminal region, thereby forming a new N-terminus of the Cas9 protein that now begins with the CP site amino acid residue. The CP site can be located in any domain of the Cas9 protein, including, for example, the helical-II domain, the RuvCIII domain, or the CTD domain. For example, the CP site may be located (relative the S. pyogenes Cas9 of SEQ ID NO: 59) at original amino acid residue 181, 199, 230, 270, 310, 1010, 1016, 1023, 1029, 1041, 1247, 1249, or 1282. Thus, once relocated to the N-terminus, original amino acid 181, 199, 230, 270, 310, 1010, 1016, 1023, 1029, 1041, 1247, 1249, or 1282 would become the new N-terminal amino acid. Nomenclature of these CP-Cas9 proteins may be referred to as Cas9-CP¹⁸¹, Cas9-CP¹⁹⁹, Cas9-CP²³⁰, Cas9-CP²⁷⁰, Cas9-CP³¹⁰, Cas9-CP¹⁰¹⁰, Cas9-CP¹⁰¹⁶, Cas9-CP¹⁰²³, Cas9-CP¹⁰²⁹, Cas9-CP¹⁰⁴¹, Cas9-CP¹²⁴⁷, Cas9-CP¹²⁴⁹, and Cas9-CP¹²⁸², respectively. This description is not meant to be limited to making CP variants from SEQ ID NO: 59, but may be implemented to make CP variants in any Cas9 sequence, either at CP sites that correspond to these positions, or at other CP sites entirely. This description is not meant to limit the specific CP sites in any way. Virtually any CP site may be used to form a CP-Cas9 variant.

[0364] Exemplary CP-Cas9 amino acid sequences, based on the Cas9 of SEQ ID NO: 59, are provided below in which linker sequences are indicated by underlining and optional methionine (M) residues are indicated in bold. It should be appreciated that the disclosure provides CP-Cas9 sequences that do not include a linker sequence or that include different linker sequences. It should be appreciated that CP-Cas9 sequences may be based on Cas9 sequences other than that of SEQ ID NO: 59 and any examples provided herein are not meant to be limiting. Exemplary CP-Cas9 sequences are as follows:

| | | SEQ |
|---|---|---|
| CP | | ID |
| name | Sequence | NO: |
| CP1012 | DYKVYDVRKMIAKSEQEIGKATAKYFFYSN | 113 |
| | IMNFFKTEITLANGEIRKRPLIETNGETGE | |
| | IVWDKGRDFATVRKVLSMPQVNIVKKTEVQ | |
| | TGGFSKESILPKRNSDKLIARKKDWDPKKY | |
| | GGFDSPTVAYSVLVVAKVEKGKSKKLKSVK | |
| | ELLGITIMERSSFEKNPIDFLEAKGYKEVK | |
| | KDLIIKLPKYSLFELENGRKRMLASAGELQ | |
| | KGNELALPSKYVNFLYLASHYEKLKGSPED | |
| | NEQKQLFVEQHKHYLDEIIEQISEFSKRVI | |
| | LADANLDKVLSAYNKHRDKPIREQAENIIH | |
| | LFTLTNLGAPAAFKYFDTTIDRKRYTSTKE | |
| | VLDATLIHQSITGLYETRIDLSQLGGDGGS | |
| | GGSGGSGGSGGSGGSGGDKKYSIGLAIGTN | |
| | SVGWAVITDEYKVPSKKFKVLGNTDRHSIK | |
| | KNLIGALLFDSGETAEATRLKRTARRRYTR | |
| | RKNRICYLQEIFSNEMAKVDDSFFHRLEES | |
| | FLVEEDKKHERHPIFGNIVDEVAYHEKYPT | |
| | IYHLRKKLVDSTDKADLRLIYLALAHMIKF | |
| | RGHFLIEGDLNPDNSDVDKLFIQLVQTYNQ | |
| | LFEENPINASGVDAKAILSARLSKSRRLEN | |
| | LIAQLPGEKKNGLFGNLIALSLGLTPNFKS | |
| | NFDLAEDAKLQLSKDTYDDDLDNLLAQIGD | |
| | QYADLFLAAKNLSDAILLSDILRVNTEITK | |
| | APLSASMIKRYDEHHQDLTLLKALVRQQLP | |
| | EKYKEIFFDQSKNGYAGYIDGGASQEEFYK | |
| | FIKPILEKMDGTEELLVKLNREDLLRKQRT | |
| | FDNGSIPHQIHLGELHAILRRQEDFYPFLK | |
| | DNREKIEKILTFRIPYYVGPLARGNSRFAW | |
| | MTRKSEETITPWNFEEVVDKGASAQSFIER | |
| | MTNFDKNLPNEKVLPKHSLLYEYFTVYNEL | |
| | TKVKYVTEGMRKPAFLSGEQKKAIVDLLFK | |
| | TNRKVTVKQLKEDYFKKIECFDSVEISGVE | |
| | DRFNASLGTYHDLLKIIKDKDFLDNEENED | |
| | ILEDIVLTLTLFEDREMIEERLKTYAHLFD | |
| | DKVMKQLKRRRYTGWGRLSRKLINGIRDKQ | |
| | SGKTILDFLKSDGFANRNFMQLIHDDSLTF | |
| | KEDIQKAQVSGQGDSLHEHIANLAGSPAIK | |
| | KGILQTVKVVDELVKVMGRHKPENIVIEMA | |
| | RENQTTQKGQKNSRERMKRIEEGIKELGSQ | |
| | ILKEHPVENTQLQNEKLYLYYLQNGRDMYV | |
| | DQELDINRLSDYDVDHIVPQSFLKDDSIDN | |
| | KVLTRSDKNRGKSDNVPSEEVVKKMKNYWR | |
| | QLLNAKLITQRKFDNLTKAERGGLSELDKA | |
| | GFIKRQLVETRQITKHVAQILDSRMNTKYD | |
| | ENDKLIREVKVITLKSKLVSDFRKDFQFYK | |
| | VREINNYHHAHDAYLNAVVGTALIKKYPKL | |
| | ESEFVYG | |
| CP1028 | EIGKATAKYFFYSNIMNFFKTEITLANGEI | 114 |
| | RKRPLIETNGETGEIVWDKGRDFATVRKVL | |
| | SMPQVNIVKKTEVQTGGFSKESILPKRNSD | |
| | KLIARKKDWDPKKYGGFDSPTVAYSVLVVA | |
| | KVEKGKSKKLKSVKELLGITIMERSSFEKN | |
| | PIDFLEAKGYKEVKKDLIIKLPKYSLFELE | |
| | NGRKRMLASAGELQKGNELALPSKYVNFLY | |
| | LASHYEKLKGSPEDNEQKQLFVEQHKHYLD | |
| | EIIEQISEFSKRVILADANLDKVLSAYNKH | |
| | RDKPIREQAENIIHLFTLTNLGAPAAFKYF | |
| | DTTIDRKRYTSTKEVLDATLIHQSITGLYE | |
| | TRIDLSQLGGDGGSGGSGGSGGSGGSGGSG | |
| | GMDKKYSIGLAIGTNSVGWAVITDEYKVPS | |
| | KKFKVLGNTDRHSIKKNLIGALLFDSGETA | |
| | EATRLKRTARRRYTRRKNRICYLQEIFSNE | |
| | MAKVDDSFFHRLEESFLVEEDKKHERHPIF | |
| | GNIVDEVAYHEKYPTIYHLRKKLVDSTDKA | |
| | DLRLIYLALAHMIKFRGHFLIEGDLNPDNS | |
| | DVDKLFIQLVQTYNQLFEENPINASGVDAK | |
| | AILSARLSKSRRLENLIAQLPGEKKNGLFG | |
| | NLIALSLGLTPNFKSNFDLAEDAKLQLSKD | |
| | TYDDDLDNLLAQIGDQYADLFLAAKNLSDA | |
| | ILLSDILRVNTEITKAPLSASMIKRYDEHH | |
| | QDLTLLKALVRQQLPEKYKEIFFDQSKNGY | |
| | AGYIDGGASQEEFYKFIKPILEKMDGTEEL | |
| | LVKLNREDLLRKQRTFDNGSIPHQIHLGEL | |
| | HAILRRQEDFYPFLKDNREKIEKILTFRIP | |
| | YYVGPLARGNSRFAWMTRKSEETITPWNFE | |
| | EVVDKGASAQSFIERMTNFDKNLPNEKVLP | |
| | KHSLLYEYFTVYNELTKVKYVTEGMRKPAF | |
| | LSGEQKKAIVDLLFKTNRKVTVKQLKEDYF | |
| | KKIECFDSVEISGVEDRFNASLGTYHDLLK | |
| | IIKDKDFLDNEENEDILEDIVLTLTLFEDR | |
| | EMIEERLKTYAHLFDDKVMKQLKRRRYTGW | |
| | GRLSRKLINGIRDKQSGKTILDFLKSDGFA | |
| | NRNFMQLIHDDSLTFKEDIQKAQVSGQGDS | |
| | LHEHIANLAGSPAIKKGILQTVKVVDELVK | |
| | VMGRHKPENIVIEMARENQTTQKGQKNSRE | |
| | RMKRIEEGIKELGSQILKEHPVENTQLQNE | |
| | KLYLYYLQNGRDMYVDQELDINRLSDYDVD | |
| | HIVPQSFLKDDSIDNKVLTRSDKNRGKSDN | |
| | VPSEEVVKKMKNYWRQLLNAKLITQRKFDN | |
| | LTKAERGGLSELDKAGFIKRQLVETRQITK | |
| | HVAQILDSRMNTKYDENDKLIREVKVITLK | |
| | SKLVSDFRKDFQFYKVREINNYHHAHDAYL | |
| | NAVVGTALIKKYPKLESEFVYGDYKVYDVR | |
| | KMIAKSEQ | |
| CP1041 | NIMNFFKTEITLANGEIRKRPLIETNGETG | 115 |
| | EIVWDKGRDFATVRKVLSMPQVNIVKKTEV | |
| | QTGGFSKESILPKRNSDKLIARKKDWDPKK | |
| | YGGFDSPTVAYSVLVVAKVEKGKSKKLKSV | |
| | KELLGITIMERSSFEKNPIDFLEAKGYKEV | |
| | KKDLIIKLPKYSLFELENGRKRMLASAGEL | |
| | QKGNELALPSKYVNFLYLASHYEKLKGSPE | |
| | DNEQKQLFVEQHKHYLDEIIEQISEFSKRV | |
| | ILADANLDKVLSAYNKHRDKPIREQAENII | |
| | HLFTLTNLGAPAAFKYFDTTIDRKRYTSTK | |
| | EVLDATLIHQSITGLYETRIDLSQLGGDGG | |
| | SGGSGGSGGSGGSGGSGGDKKYSIGLAIGT | |
| | NSVGWAVITDEYKVPSKKFKVLGNTDRHSI | |
| | KKNLIGALLFDSGETAEATRLKRTARRRYT | |
| | RRKNRICYLQEIFSNEMAKVDDSFFHRLEE | |
| | SFLVEEDKKHERHPIFGNIVDEVAYHEKYP | |
| | TIYHLRKKLVDSTDKADLRLIYLALAHMIK | |
| | FRGHFLIEGDLNPDNSDVDKLFIQLVQTYN | |
| | QLFEENPINASGVDAKAILSARLSKSRRLE | |
| | NLIAQLPGEKKNGLFGNLIALSLGLTPNFK | |
| | SNFDLAEDAKLQLSKDTYDDDLDNLLAQIG | |
| | DQYADLFLAAKNLSDAILLSDILRVNTEIT | |
| | KAPLSASMIKRYDEHHQDLTLLKALVRQQL | |
| | PEKYKEIFFDQSKNGYAGYIDGGASQEEFY | |
| | KFIKPILEKMDGTEELLVKLNREDLLRKQR | |
| | TFDNGSIPHQIHLGELHAILRRQEDFYPFL | |
| | KDNREKIEKILTFRIPYYVGPLARGNSRFA | |
| | WMTRKSEETITPWNFEEVVDKGASAQSFIE | |
| | RMTNFDKNLPNEKVLPKHSLLYEYFTVYNE | |
| | LTKVKYVTEGMRKPAFLSGEQKKAIVDLLF | |
| | KTNRKVTVKQLKEDYFKKIECFDSVEISGV | |
| | EDRFNASLGTYHDLLKIIKDKDFLDNEENE | |
| | DILEDIVLTLTLFEDREMIEERLKTYAHLF | |
| | DDKVMKQLKRRRYTGWGRLSRKLINGIRDK | |
| | QSGKTILDFLKSDGFANRNFMQLIHDDSLT | |
| | FKEDIQKAQVSGQGDSLHEHIANLAGSPAI | |
| | KKGILQTVKVVDELVKVMGRHKPENIVIEM | |
| | ARENQTTQKGQKNSRERMKRIEEGIKELGS | |
| | QILKEHPVENTQLQNEKLYLYYLQNGRDMY | |
| | VDQELDINRLSDYDVDHIVPQSFLKDDSID | |
| | NKVLTRSDKNRGKSDNVPSEEVVKKMKNYW | |
| | RQLLNAKLITQRKFDNLTKAERGGLSELDK | |
| | AGFIKRQLVETRQITKHVAQILDSRMNTKY | |
| | DENDKLIREVKVITLKSKLVSDFRKDFQFY | |
| | KVREINNYHHAHDAYLNAVVGTALIKKYPK | |
| | LESEFVYGDYKVYDVRKMIAKSEQEIGKAT | |
| | AKYFFYS | |
| CP1249 | PEDNEQKQLFVEQHKHYLDEIIEQISEFSK | 116 |
| | RVILADANLDKVLSAYNKHRDKPIREQAEN | |
| | IIHLFTLTNLGAPAAFKYFDTTIDRKRYTS | |
| | TKEVLDATLIHQSITGLYETRIDLSQLGGD | |
| | GGSGGSGGSGGSGGSGGSGGMDKKYSIGLA | |
| | IGTNSVGWAVITDEYKVPSKKFKVLGNTDR | |
| | HSIKKNLIGALLFDSGETAEATRLKRTARR | |
| | RYTRRKNRICYLQEIFSNEMAKVDDSFFHR | |
| | LEESFLVEEDKKHERHPIFGNIVDEVAYHE | |
| | KYPTIYHLRKKLVDSTDKADLRLIYLALAH | |
| | MIKFRGHFLIEGDLNPDNSDVDKLFIQLVQ | |
| | TYNQLFEENPINASGVDAKAILSARLSKSR | |
| | RLENLIAQLPGEKKNGLFGNLIALSLGLTP | |
| | NFKSNFDLAEDAKLQLSKDTYDDDLDNLLA | |
| | QIGDQYADLFLAAKNLSDAILLSDILRVNT | |
| | EITKAPLSASMIKRYDEHHQDLTLLKALVR | |
| | QQLPEKYKEIFFDQSKNGYAGYIDGGASQE | |
| | EFYKFIKPILEKMDGTEELLVKLNREDLLR | |
| | KQRTFDNGSIPHQIHLGELHAILRRQEDFY | |
| | PFLKDNREKIEKILTFRIPYYVGPLARGNS | |
| | RFAWMTRKSEETITPWNFEEVVDKGASAQS | |
| | FIERMTNFDKNLPNEKVLPKHSLLYEYFTV | |
| | YNELTKVKYVTEGMRKPAFLSGEQKKAIVD | |
| | LLFKTNRKVTVKQLKEDYFKKIECFDSVEI | |
| | SGVEDRFNASLGTYHDLLKIIKDKDFLDNE | |
| | ENEDILEDIVLTLTLFEDREMIEERLKTYA | |
| | HLFDDKVMKQLKRRRYTGWGRLSRKLINGI | |
| | RDKQSGKTILDFLKSDGFANRNFMQLIHDD | |
| | SLTFKEDIQKAQVSGQGDSLHEHIANLAGS | |
| | PAIKKGILQTVKVVDELVKVMGRHKPENIV | |
| | IEMARENQTTQKGQKNSRERMKRIEEGIKE | |
| | LGSQILKEHPVENTQLQNEKLYLYYLQNGR | |
| | DMYVDQELDINRLSDYDVDHIVPQSFLKDD | |
| | SIDNKVLTRSDKNRGKSDNVPSEEVVKKMK | |
| | NYWRQLLNAKLITQRKFDNLTKAERGGLSE | |
| | LDKAGFIKRQLVETRQITKHVAQILDSRMN | |
| | TKYDENDKLIREVKVITLKSKLVSDFRKDF | |
| | QFYKVREINNYHHAHDAYLNAVVGTALIKK | |
| | YPKLESEFVYGDYKVYDVRKMIAKSEQEIG | |
| | KATAKYFFYSNIMNFFKTEITLANGEIRKR | |
| | PLIETNGETGEIVWDKGRDFATVRKVLSMP | |
| | QVNIVKKTEVQTGGFSKESILPKRNSDKLI | |
| | ARKKDWDPKKYGGFDSPTVAYSVLVVAKVE | |
| | KGKSKKLKSVKELLGITIMERSSFEKNPID | |
| | FLEAKGYKEVKKDLIIKLPKYSLFELENGR | |
| | KRMLASAGELQKGNELALPSKYVNFLYLAS | |
| | HYEKLKGS | |
| CP1300 | KPIREQAENIIHLFTLTNLGAPAAFKYFDT | 117 |
| | TIDRKRYTSTKEVLDATLIHQSITGLYETR | |
| | IDLSQLGGDGGSGGSGGSGGSGGSGGSGGD | |
| | KKYSIGLAIGTNSVGWAVITDEYKVPSKKF | |
| | KVLGNTDRHSIKKNLIGALLFDSGETAEAT | |
| | RLKRTARRRYTRRKNRICYLQEIFSNEMAK | |
| | VDDSFFHRLEESFLVEEDKKHERHPIFGNI | |
| | VDEVAYHEKYPTIYHLRKKLVDSTDKADLR | |
| | LIYLALAHMIKFRGHFLIEGDLNPDNSDVD | |
| | KLFIQLVQTYNQLFEENPINASGVDAKAIL | |
| | SARLSKSRRLENLIAQLPGEKKNGLFGNLI | |
| | ALSLGLTPNFKSNFDLAEDAKLQLSKDTYD | |
| | DDLDNLLAQIGDQYADLFLAAKNLSDAILL | |
| | SDILRVNTEITKAPLSASMIKRYDEHHQDL | |
| | TLLKALVRQQLPEKYKEIFFDQSKNGYAGY | |
| | IDGGASQEEFYKFIKPILEKMDGTEELLVK | |
| | LNREDLLRKQRTFDNGSIPHQIHLGELHAI | |
| | LRRQEDFYPFLKDNREKIEKILTFRIPYYV | |
| | GPLARGNSRFAWMTRKSEETITPWNFEEVV | |
| | DKGASAQSFIERMTNFDKNLPNEKVLPKHS | |
| | LLYEYFTVYNELTKVKYVTEGMRKPAFLSG | |
| | EQKKAIVDLLFKTNRKVTVKQLKEDYFKKI | |
| | ECFDSVEISGVEDRFNASLGTYHDLLKIIK | |
| | DKDFLDNEENEDILEDIVLTLTLFEDREMI | |
| | EERLKTYAHLFDDKVMKQLKRRRYTGWGRL | |
| | SRKLINGIRDKQSGKTILDFLKSDGFANRN | |
| | FMQLIHDDSLTFKEDIQKAQVSGQGDSLHE | |
| | HIANLAGSPAIKKGILQTVKVVDELVKVMG | |
| | RHKPENIVIEMARENQTTQKGQKNSRERMK | |
| | RIEEGIKELGSQILKEHPVENTQLQNEKLY | |
| | LYYLQNGRDMYVDQELDINRLSDYDVDHIV | |
| | PQSFLKDDSIDNKVLTRSDKNRGKSDNVPS | |
| | EEVVKKMKNYWRQLLNAKLITQRKFDNLTK | |
| | AERGGLSELDKAGFIKRQLVETRQITKHVA | |
| | QILDSRMNTKYDENDKLIREVKVITLKSKL | |
| | VSDFRKDFQFYKVREINNYHHAHDAYLNAV | |
| | VGTALIKKYPKLESEFVYGDYKVYDVRKMI | |
| | AKSEQEIGKATAKYFFYSNIMNFFKTEITL | |
| | ANGEIRKRPLIETNGETGEIVWDKGRDFAT | |
| | VRKVLSMPQVNIVKKTEVQTGGFSKESILP | |
| | KRNSDKLIARKKDWDPKKYGGFDSPTVAYS | |
| | VLVVAKVEKGKSKKLKSVKELLGITIMERS | |
| | SFEKNPIDFLEAKGYKEVKKDLIIKLPKYS | |
| | LFELENGRKRMLASAGELQKGNELALPSKY | |
| | VNFLYLASHYEKLKGSPEDNEQKQLFVEQH | |
| | KHYLDEIIEQISEFSKRVILADANLDKVLS | |
| | AYNKHRD | |

[0365] The Cas9 circular permutants that may be useful in the base editing constructs described herein. Exemplary C-terminal fragments of Cas9, based on the Cas9 of SEQ ID NO: 58, which may be rearranged to an N-terminus of Cas9, are provided below. It should be appreciated that such C-terminal fragments of Cas9 are exemplary and are not meant to be limiting. These exemplary CP-Cas9 fragments have the following sequences:

| | | SEQ |
|---|---|---|
| | | ID |
| CP name | Sequence | NO: |
| CP1012 | DYKVYDVRKMIAKSEQEIGKATAKYFFYSNIMN | 118 |
| C- | FFKTEITLANGEIRKRPLIETNGETGEIVWDKG | |
| terminal | RDFATVRKVLSMPQVNIVKKTEVQTGGFSKESI | |
| fragment | LPKRNSDKLIARKKDWDPKKYGGFDSPTVAYSV | |
| | LVVAKVEKGKSKKLKSVKELLGITIMERSSFEK | |
| | NPIDFLEAKGYKEVKKDLIIKLPKYSLFELENG | |
| | RKRMLASAGELQKGNELALPSKYVNFLYLASHY | |
| | EKLKGSPEDNEQKQLFVEQHKHYLDEIIEQISE | |
| | FSKRVILADANLDKVLSAYNKHRDKPIREQAEN | |
| | IIHLFTLTNLGAPAAFKYFDTTIDRKRYTSTKE | |
| | VLDATLIHQSITGLYETRIDLSQLGGD | |
| CP1028 | EIGKATAKYFFYSNIMNFFKTEITLANGEIRKR | 119 |
| C- | PLIETNGETGEIVWDKGRDFATVRKVLSMPQVN | |
| terminal | IVKKTEVQTGGFSKESILPKRNSDKLIARKKDW | |
| fragment | DPKKYGGFDSPTVAYSVLVVAKVEKGKSKKLKS | |
| | VKELLGITIMERSSFEKNPIDFLEAKGYKEVKK | |
| | DLIIKLPKYSLFELENGRKRMLASAGELQKGNE | |
| | LALPSKYVNFLYLASHYEKLKGSPEDNEQKQLF | |
| | VEQHKHYLDEIIEQISEFSKRVILADANLDKVL | |
| | SAYNKHRDKPIREQAENIIHLFTLTNLGAPAAF | |
| | KYFDTTIDRKRYTSTKEVLDATLIHQSITGLYE | |
| | TRIDLSQLGGD | |
| CP1041 | NIMNFFKTEITLANGEIRKRPLIETNGETGEIV | 120 |
| C- | WDKGRDFATVRKVLSMPQVNIVKKTEVQTGGFS | |
| terminal | KESILPKRNSDKLIARKKDWDPKKYGGFDSPTV | |
| fragment | AYSVLVVAKVEKGKSKKLKSVKELLGITIMERS | |
| | SFEKNPIDFLEAKGYKEVKKDLIIKLPKYSLFE | |
| | LENGRKRMLASAGELQKGNELALPSKYVNFLYL | |
| | ASHYEKLKGSPEDNEQKQLFVEQHKHYLDEIIE | |
| | QISEFSKRVILADANLDKVLSAYNKHRDKPIRE | |
| | QAENIIHLFTLTNLGAPAAFKYFDTTIDRKRYT | |
| | STKEVLDATLIHQSITGLYETRIDLSQLGGD | |
| CP1249 | PEDNEQKQLFVEQHKHYLDEIIEQISEFSKRVI | 121 |
| C- | LADANLDKVLSAYNKHRDKPIREQAENIIHLFT | |
| terminal | LTNLGAPAAFKYFDTTIDRKRYTSTKEVLDATL | |
| fragment | IHQSITGLYETRIDLSQLGGD | |
| CP1300 | KPIREQAENIIHLFTLTNLGAPAAFKYFDTTID | 122 |
| C- | RKRYTSTKEVLDATLIHQSITGLYETRIDLSQL | |
| terminal | GGD | |
| fragment | | |

(10) Cas9 Variants with Modified PAM Specificities

[0366] The base editors of the present disclosure may also comprise Cas9 variants with modified PAM specificities. For example, the base editors described herein may utilize any naturally occurring or engineered variant of SpCas9 having expanded and/or relaxed PAM specificities which are described in the literature, including in Nishimasu et al., “Engineered CRISPR-Cas9 nuclease with expanded targeting space,” Science, 2018, 361: 1259-1262; Chatterjee et al., “Robust Genome Editing of Single-Base PAM Targets with Engineered ScCas9 Variants,” BioRxiv, Apr. 26, 2019Some aspects of this disclosure provide Cas9 proteins that exhibit activity on a target sequence that does not comprise the canonical PAM (5′-NGG-3′, where N is A, C, G, or T) at its 3′-end. In some embodiments, the Cas9 protein exhibits activity on a target sequence comprising a 5′-NGG-3′ PAM sequence at its 3′-end. In some embodiments, the Cas9 protein exhibits activity on a target sequence comprising a 5′-NNG-3′ PAM sequence at its 3′-end. In some embodiments, the Cas9 protein exhibits activity on a target sequence comprising a 5′-NNA-3′ PAM sequence at its 3′-end. In some embodiments, the Cas9 protein exhibits activity on a target sequence comprising a 5′-NNC-3′ PAM sequence at its 3′-end. In some embodiments, the Cas9 protein exhibits activity on a target sequence comprising a 5′-NNT-3′ PAM sequence at its 3′-end. In some embodiments, the Cas9 protein exhibits activity on a target sequence comprising a 5′-NGT-3′ PAM sequence at its 3′-end. In some embodiments, the Cas9 protein exhibits activity on a target sequence comprising a 5′-NGA-3′ PAM sequence at its 3′-end. In some embodiments, the Cas9 protein exhibits activity on a target sequence comprising a 5′-NGC-3′ PAM sequence at its 3′-end. In some embodiments, the Cas9 protein exhibits activity on a target sequence comprising a 5′-NAA-3′ PAM sequence at its 3′-end. In some embodiments, the Cas9 protein exhibits activity on a target sequence comprising a 5′-NAC-3′ PAM sequence at its 3′-end. In some embodiments, the Cas9 protein exhibits activity on a target sequence comprising a 5′-NAT-3′ PAM sequence at its 3′-end. In still other embodiments, the Cas9 protein exhibits activity on a target sequence comprising a 5′-NAG-3′ PAM sequence at its 3′-end.

[0367] It should be appreciated that any of the amino acid mutations described herein, (e.g., A262T) from a first amino acid residue (e.g., A) to a second amino acid residue (e.g., T) may also include mutations from the first amino acid residue to an amino acid residue that is similar to (e.g., conserved) the second amino acid residue. For example, mutation of an amino acid with a hydrophobic side chain (e.g., alanine, valine, isoleucine, leucine, methionine, phenylalanine, tyrosine, or tryptophan) may be a mutation to a second amino acid with a different hydrophobic side chain (e.g., alanine, valine, isoleucine, leucine, methionine, phenylalanine, tyrosine, or tryptophan). For example, a mutation of an alanine to a threonine (e.g., a A262T mutation) may also be a mutation from an alanine to an amino acid that is similar in size and chemical properties to a threonine, for example, serine. As another example, mutation of an amino acid with a positively charged side chain (e.g., arginine, histidine, or lysine) may be a mutation to a second amino acid with a different positively charged side chain (e.g., arginine, histidine, or lysine). As another example, mutation of an amino acid with a polar side chain (e.g., serine, threonine, asparagine, or glutamine) may be a mutation to a second amino acid with a different polar side chain (e.g., serine, threonine, asparagine, or glutamine). Additional similar amino acid pairs include, but are not limited to, the following: phenylalanine and tyrosine; asparagine and glutamine; methionine and cysteine; aspartic acid and glutamic acid; and arginine and lysine. The skilled artisan would recognize that such conservative amino acid substitutions will likely have minor effects on protein structure and are likely to be well tolerated without compromising function. In some embodiments, any amino of the amino acid mutations provided herein from one amino acid to a threonine may be an amino acid mutation to a serine. In some embodiments, any amino of the amino acid mutations provided herein from one amino acid to an arginine may be an amino acid mutation to a lysine. In some embodiments, any amino of the amino acid mutations provided herein from one amino acid to an isoleucine, may be an amino acid mutation to an alanine, valine, methionine, or leucine. In some embodiments, any amino of the amino acid mutations provided herein from one amino acid to a lysine may be an amino acid mutation to an arginine. In some embodiments, any amino of the amino acid mutations provided herein from one amino acid to an aspartic acid may be an amino acid mutation to a glutamic acid or asparagine. In some embodiments, any amino of the amino acid mutations provided herein from one amino acid to a valine may be an amino acid mutation to an alanine, isoleucine, methionine, or leucine. In some embodiments, any amino of the amino acid mutations provided herein from one amino acid to a glycine may be an amino acid mutation to an alanine. It should be appreciated, however, that additional conserved amino acid residues would be recognized by the skilled artisan and any of the amino acid mutations to other conserved amino acid residues are also within the scope of this disclosure.

[0368] In some embodiments, the Cas9 protein comprises a combination of mutations that exhibit activity on a target sequence comprising a 5′-NAA-3′ PAM sequence at its 3′-end. In some embodiments, the combination of mutations are present in any one of the clones listed in Table 1. In some embodiments, the combination of mutations are conservative mutations of the clones listed in Table 1. In some embodiments, the Cas9 protein comprises the combination of mutations of any one of the Cas9 clones listed in Table 1.

TABLE 1
NAA PAM Clones
Mutations from wild-type SpCas9 (e.g., SEQ ID NO: 59)
D177N, K218R, D614N, D1135N, P1137S, E1219V, A1320V, A1323D, R1333K
D177N, K218R, D614N, D1135N, E1219V, Q1221H, H1264Y, A1320V, R1333K
A10T, I322V, S409I, E427G, G715C, D1135N, E1219V, Q1221H, H1264Y, A1320V, R1333K
A367T, K710E, R1114G, D1135N, P1137S, E1219V, Q1221H, H1264Y, A1320V, R1333K
A10T, I322V, S409I, E427G, R753G, D861N, D1135N, K1188R, E1219V, Q1221H, H1264H, A1320V,
R1333K
A10T, I322V, S4091, E427G, R654L, V743I, R753G, M1021T, D1135N, D1180G, K1211R, E1219V,
Q1221H, H1264Y, A1320V, R1333K
A10T, I322V, S409I, E427G, V743I, R753G, E762G, D1135N, D1180G, K1211R, E1219V, Q1221H,
H1264Y, A1320V, R1333K
A10T, I322V, S409I, E427G, R753G, D1135N, D1180G, K1211R, E1219V, Q1221H, H1264Y, S1274R,
A1320V, R1333K
A10T, I322V, S409I, E427G, A589S, R753G, D1135N, E1219V, Q1221H, H1264H, A1320V, R1333K
A10T, I322V, S409I, E427G, R753G, E757K, G865G, D1135N, E1219V, Q1221H, H1264Y, A1320V,
R1333K
A10T, I322V, S4091, E427G, R654L, R753G, E757K, D1135N, E1219V, Q1221H, H1264Y, A1320V,
R1333K
A10T, I322V, S409I, E427G, K599R, M631A, R654L, K673E, V743I, R753G, N758H, E762G, D1135N,
D1180G, E1219V, Q1221H, Q1256R, H1264Y, A1320V, A1323D, R1333K
A10T, 1322V, S409I, E427G, R654L, K673E, V743I, R753G, E762G, N869S, N1054D, R1114G,
D1135N, D1180G, E1219V, Q1221H, H1264Y, A1320V, A1323D, R1333K
A10T, I322V, S4091, E427G, R654L, L727I, V743I, R753G, E762G, R859S, N946D, F1134L, D1135N,
D1180G, E1219V, Q1221H, H1264Y, N1317T, A1320V, A1323D, R1333K
A10T, 1322V, S409I, E427G, R654L, K673E, V743I, R753G, E762G, N803S, N869S, Y1016D, G1077D,
R1114G, F1134L, D1135N, D1180G, E1219V, Q1221H, H1264Y, V1290G, L1318S, A1320V, A1323D,
R1333K
A10T, I322V, S4091, E427G, R654L, K673E, V743I, R753G, E762G, N803S, N869S, Y1016D, G1077D,
R1114G, F1134L, D1135N, K1151E, D1180G, E1219V, Q1221H, H1264Y, V1290G, L1318S, A1320V,
R1333K
A10T, I322V, S409I, E427G, R654L, K673E, V743I, R753G, E762G, N803S, N869S, Y1016D, G1077D,
R1114G, F1134L, D1135N, D1180G, E1219V, Q1221H, H1264Y, V1290G, L1318S, A1320V, A1323D,
R1333K
A10T, I322V, S4091, E427G, R654L, K673E, F693L, V743I, R753G, E762G, N803S, N869S, L921P,
Y1016D, G1077D, F1080S, R1114G, D1135N, D1180G, E1219V, Q1221H, H1264Y, L1318S, A1320V,
A1323D, R1333K
A10T, I322V, S4091, E427G, E630K, R654L, K673E, V743I, R753G, E762G, Q768H, N803S, N869S,
Y1016D, G1077D, R1114G, F1134L, D1135N, D1180G, E1219V, Q1221H, H1264Y, L1318S, A1320V,
R1333K
A10T, I322V, S4091, E427G, R654L, K673E, F693L, V743I, R753G, E762G, Q768H, N803S, N869S,
Y1016D, G1077D, R1114G, F1134L, D1135N, D1180G, E1219V, Q1221H, G1223S, H1264Y, L1318S,
A1320V, R1333K
A10T, I322V, S4091, E427G, R654L, K673E, F693L, V743I, R753G, E762G, N803S, N869S, L921P,
Y1016D, G1077D, F1801S, R1114G, D1135N, D1180G, E1219V, Q1221H, H1264Y, L1318S, A1320V,
A1323D, R1333K
A10T, I322V, S409I, E427G, R654L, V743I, R753G, M1021T, D1135N, D1180G, K1211R, E1219V,
Q1221H, H1264Y, A1320V, R1333K
A10T, I322V, S4091, E427G, R654L, K673E, V743I, R753G, E762G, M673I, N803S, N869S, G1077D,
R1114G, D1135N, V1139A, D1180G, E1219V, Q1221H, A1320V, R1333K
A10T, I322V, S4091, E427G, R654L, K673E, V743I, R753G, E762G, N803S, N869S, R1114G, D1135N,
E1219V, Q1221H, A1320V, R1333K

[0369] In some embodiments, the Cas9 protein comprises an amino acid sequence that is at least 80% identical to the amino acid sequence of a Cas9 protein as provided by any one of the variants of Table 1. In some embodiments, the Cas9 protein comprises an amino acid sequence that is at least 85%, at least 90%, at least 92%, at least 95%, at least 96%, at least 97%, at least 98%, at least 99%, or at least 99.5% identical to the amino acid sequence of a Cas9 protein as provided by any one of the variants of Table 1.

[0370] In some embodiments, the Cas9 protein exhibits an increased activity on a target sequence that does not comprise the canonical PAM (5′-NGG-3′) at its 3′ end as compared to Streptococcus pyogenes Cas9 as provided by SEQ ID NO: 59. In some embodiments, the Cas9 protein exhibits an activity on a target sequence having a 3′ end that is not directly adjacent to the canonical PAM sequence (5′-NGG-3′) that is at least 5-fold increased as compared to the activity of Streptococcus pyogenes Cas9 as provided by SEQ ID NO: 59 on the same target sequence. In some embodiments, the Cas9 protein exhibits an activity on a target sequence that is not directly adjacent to the canonical PAM sequence (5′-NGG-3′) that is at least 10-fold, at least 50-fold, at least 100-fold, at least 500-fold, at least 1,000-fold, at least 5,000-fold, at least 10,000-fold, at least 50,000-fold, at least 100,000-fold, at least 500,000-fold, or at least 1,000,000-fold increased as compared to the activity of Streptococcus pyogenes as provided by SEQ ID NO: 59 on the same target sequence. In some embodiments, the 3 end of the target sequence is directly adjacent to an AAA, GAA, CAA, or TAA sequence. In some embodiments, the Cas9 protein comprises a combination of mutations that exhibit activity on a target sequence comprising a 5′-NAC-3′ PAM sequence at its 3′-end. In some embodiments, the combination of mutations are present in any one of the clones listed in Table 2. In some embodiments, the combination of mutations are conservative mutations of the clones listed in Table 2. In some embodiments, the Cas9 protein comprises the combination of mutations of any one of the Cas9 clones listed in Table 2.

TABLE 2
NAC PAM Clones
Mutations from wild-type SpCas9 (e.g., SEQ ID NO: 59)
T472I, R753G, K890E, D1332N, R1335Q, T1337N
I1057S, D1135N, P1301S, R1335Q, T1337N
T472I, R753G, D1332N, R1335Q, T1337N
D1135N, E1219V, D1332N, R1335Q, T1337N
T472I, R753G, K890E, D1332N, R1335Q, T1337N
I1057S, D1135N, P1301S, R1335Q, T1337N
T472I, R753G, D1332N, R1335Q, T1337N
T472I, R753G, Q771H, D1332N, R1335Q, T1337N
E627K, T638P, K652T, R753G, N803S, K959N, R1114G, D1135N, E1219V, D1332N, R1335Q, T1337N
E627K, T638P, K652T, R753G, N803S, K959N, R1114G, D1135N, K1156E, E1219V, D1332N, R1335Q,
T1337N
E627K, T638P, V6471, R753G, N803S, K959N, G1030R, I1055E, R1114G, D1135N, E1219V, D1332N,
R1335Q, T1337N
E627K, E630G, T638P, V647A, G687R, N767D, N803S, K959N, R1114G, D1135N, E1219V, D1332G,
R1335Q, T1337N
E627K, T638P, R753G, N803S, K959N, R1114G, D1135N, E1219V, N1266H, D1332N, R1335Q, T1337N
E627K, T638P, R753G, N803S, K959N, I1057T, R1114G, D1135N, E1219V, D1332N, R1335Q, T1337N
E627K, T638P, R753G, N803S, K959N, R1114G, D1135N, E1219V, D1332N, R1335Q, T1337N
E627K, M631I, T638P, R753G, N803S, K959N, Y1036H, R1114G, D1135N, E1219V, D1251G, D1332G,
R1335Q, T1337N
E627K, T638P, R753G, N803S, V875I, K959N, Y1016C, R1114G, D1135N, E1219V, D1251G, D1332G,
R1335Q, T1337N, I1348V
K608R, E627K, T638P, V6471, R654L, R753G, N803S, T804A, K848N, V922A, K959N, R1114G,
D1135N, E1219V, D1332N, R1335Q, T1337N
K608R, E627K, T638P, V6471, R753G, N803S, V922A, K959N, K1014N, V1015A, R1114G, D1135N,
K1156N, E1219V, N1252D, D1332N, R1335Q, T1337N
K608R, E627K, R629G, T638P, V6471, A711T, R753G, K775R, K789E, N803S, K959N, V1015A,
Y1036H, R1114G, D1135N, E1219V, N1286H, D1332N, R1335Q, T1337N
K608R, E627K, T638P, V6471, T740A, R753G, N803S, K948E, K959N, Y1016S, R1114G, D1135N,
E1219V, N1286H, D1332N, R1335Q, T1337N
K608R, E627K, T638P, V6471, T740A, N803S, K948E, K959N, Y1016S, R1114G, D1135N, E1219V,
N1286H, D1332N, R1335Q, T1337N
I670S, K608R, E627K, E630G, T638P, V6471, R653K, R753G, I795L, K797N, N803S, K866R, K890N,
K959N, Y1016C, R1114G, D1135N, E1219V, D1332N, R1335Q, T1337N
K608R, E627K, T638P, V6471, T740A, G752R, R753G, K797N, N803S, K948E, K959N, V1015A,
Y1016S, R1114G, D1135N, E1219V, N1266H, D1332N, R1335Q, T1337N
I570T, A589V, K608R, E627K, T638P, V6471, R654L, Q716R, R753G, N803S, K948E, K959N, Y1016S,
R1114G, D1135N, E1207G, E1219V, N1234D, D1332N, R1335Q, T1337N
K608R, E627K, R629G, T638P, V6471, R654L, Q740R, R753G, N803S, K959N, N990S, T995S,
V1015A, Y1036D, R1114G, D1135N, E1207G, E1219V, N1234D, N1266H, D1332N, R1335Q, T1337N
I562F, V565D, 1570T, K608R, L625S, E627K, T638P, V6471, R654I, G752R, R753G, N803S, N808D,
K959N, M1021L, R1114G, D1135N, N1177S, N1234D, D1332N, R1335Q, T1337N
I562F, 1570T, K608R, E627K, T638P, V6471, R753G, E790A, N803S, K959N, V1015A, Y1036H,
R1114G, D1135N, D1180E, A1184T, E1219V, D1332N, R1335Q, T1337N
I570T, K608R, E627K, T638P, V6471, R654H, R753G, E790A, N803S, K959N, V1015A, R1114G,
D1127A, D1135N, E1219V, D1332N, R1335Q, T1337N
I570T, K608R, L625S, E627K, T638P, V6471, R654I, T703P, R753G, N803S, N808D, K959N, M1021L,
R1114G, D1135N, E1219V, D1332N, R1335Q, T1337N
I570S, K608R, E627K, E630G, T638P, V6471, R653K, R753G, I795L, N803S, K866R, K890N, K959N,
Y1016C, R1114G, D1135N, E1219V, D1332N, R1335Q, T1337N
I570T, K608R, E627K, T638P, V647I, R654H, R753G, E790A, N803S, K959N, V1016A, R1114G,
D1135N, E1219V, K1246E, D1332N, R1335Q, T1337N
K608R, E627K, T638P, V6471, R654L, K673E, R753G, E790A, N803S, K948E, K959N, R1114G,
D1127G, D1135N, D1180E, E1219V, N1286H, D1332N, R1335Q, T1337N
K608R, L625S, E627K, T638P, V6471, R654I, I670T, R753G, N803S, N808D, K959N, M1021L,
R1114G, D1135N, E1219V, N1286H, D1332N, R1335Q, T1337N
E627K, M631V, T638P, V647I, K710E, R753G, N803S, N808D, K948E, M1021L, R1114G, D1135N,
E1219V, D1332N, R1335Q, T1337N, S1338T, H1349R

[0371] In some embodiments, the Cas9 protein comprises an amino acid sequence that is at least 80% identical to the amino acid sequence of a Cas9 protein as provided by any one of the variants of Table 2. In some embodiments, the Cas9 protein comprises an amino acid sequence that is at least 85%, at least 90%, at least 92%, at least 95%, at least 96%, at least 97%, at least 98%, at least 99%, or at least 99.5% identical to the amino acid sequence of a Cas9 protein as provided by any one of the variants of Table 2.

[0372] In some embodiments, the Cas9 protein exhibits an increased activity on a target sequence that does not comprise the canonical PAM (5′-NGG-3′) at its 3′ end as compared to Streptococcus pyogenes Cas9 as provided by SEQ ID NO: 59. In some embodiments, the Cas9 protein exhibits an activity on a target sequence having a 3′ end that is not directly adjacent to the canonical PAM sequence (5′-NGG-3′) that is at least 5-fold increased as compared to the activity of Streptococcus pyogenes Cas9 as provided by SEQ ID NO: 59 on the same target sequence. In some embodiments, the Cas9 protein exhibits an activity on a target sequence that is not directly adjacent to the canonical PAM sequence (5′-NGG-3′) that is at least 10-fold, at least 50-fold, at least 100-fold, at least 500-fold, at least 1,000-fold, at least 5,000-fold, at least 10,000-fold, at least 50,000-fold, at least 100,000-fold, at least 500,000-fold, or at least 1,000,000-fold increased as compared to the activity of Streptococcus pyogenes as provided by SEQ ID NO: 59 on the same target sequence. In some embodiments, the 3′ end of the target sequence is directly adjacent to an AAC, GAC, CAC, or TAC sequence.

[0373] In some embodiments, the Cas9 protein comprises a combination of mutations that exhibit activity on a target sequence comprising a 5′-NAT-3′ PAM sequence at its 3′-end. In some embodiments, the combination of mutations are present in any one of the clones listed in Table 3. In some embodiments, the combination of mutations are conservative mutations of the clones listed in Table 3. In some embodiments, the Cas9 protein comprises the combination of mutations of any one of the Cas9 clones listed in Table 3.

TABLE 3
NAT PAM Clones
Mutations from wild-type SpCas9 (e.g., SEQ ID NO: 59)
K961E, H985Y, D1135N, K1191N, E1219V, Q1221H, A1320A, P1321S, R1335L
D1135N, G1218S, E1219V, Q1221H, P1249S, P1321S, D1322G, R1335L
V743I, R753G, E790A, D1135N, G1218S, E1219V, Q1221H, A1227V, P1249S, N1286K, A1293T,
P1321S, D1322G, R1335L, T1339I
F575S, M631L, R654L, V748I, V743I, R753G, D853E, V922A, R1114G D1135N, G1218S, E1219V,
Q1221H, A1227V, P1249S, N1286K, A1293T, P1321S, D1322G, R1335L, T1339I
F575S, M631L, R654L, R664K, R753G, D853E, V922A, R1114G D1135N, D1180G, G1218S, E1219V,
Q1221H, P1249S, N1286K, P1321S, D1322G, R1335L
M631L, R654L, R753G, K797E, D853E, V922A, D1012A, R1114G D1135N, G1218S, E1219V, Q1221H,
P1249S, N1317K, P1321S, D1322G, R1335L
F575S, M631L, R654L, R664K, R753G, D853E, V922A, R1114G, Y1131C, D1135N, D1180G, G1218S,
E1219V, Q1221H, P1249S, P1321S, D1322G, R1335L
F575S, M631L, R654L, R664K, R753G, D853E, V922A, R1114G, Y1131C, D1135N, D1180G, G1218S,
E1219V, Q1221H, P1249S, P1321S, D1322G, R1335L
F575S, D596Y, M631L, R654L, R664K, R753G, D853E, V922A, R1114G, Y1131C, D1135N, D1180G,
G1218S, E1219V, Q1221H, P1249S, Q1256R, P1321S, D1322G, R1335L
F575S, M631L, R654L, R664K, K710E, V750A, R753G, D853E, V922A, R1114G, Y1131C, D1135N,
D1180G, G1218S, E1219V, Q1221H, P1249S, P1321S, D1322G, R1335L
F575S, M631L, K649R, R654L, R664K, R753G, D853E, V922A, R1114G, Y1131C, D1135N, K1156E,
D1180G, G1218S, E1219V, Q1221H, P1249S, P1321S, D1322G, R1335L
F575S, M631L, R654L, R664K, R753G, D853E, V922A, R1114G, Y1131C, D1135N, D1180G, G1218S,
E1219V, Q1221H, P1249S, P1321S, D1322G, R1335L
F575S, M631L, R654L, R664K, R753G, D853E, V922A, I1057G, R1114G, Y1131C, D1135N, D1180G,
G1218S, E1219V, Q1221H, P1249S, N1308D, P1321S, D1322G, R1335L
M631L, R654L, R753G, D853E, V922A, R1114G, Y1131C, D1135N, E1150V, D1180G, G1218S,
E1219V, Q1221H, P1249S, P1321S, D1332G, R1335L
M631L, R654L, R664K, R753G, D853E, I1057V, Y1131C, D1135N, D1180G, G1218S, E1219V,
Q1221H, P1249S, P1321S, D1332G, R1335L
M631L, R654L, R664K, R753G, I1057V, R1114G, Y1131C, D1135N, D1180G, G1218S, E1219V,
Q1221H, P1249S, P1321S, D1332G, R1335L

[0374] The above description of various napDNAbps which can be used in connection with the presently disclose base editors is not meant to be limiting in any way. The base editors may comprise the canonical SpCas9, or any ortholog Cas9 protein, or any variant Cas9 protein—including any naturally occurring variant, mutant, or otherwise engineered version of Cas9—that is known or which can be made or evolved through a directed evolutionary or otherwise mutagenic process. In various embodiments, the Cas9 or Cas9 variants have a nickase activity, i.e., only cleave of strand of the target DNA sequence. In other embodiments, the Cas9 or Cas9 variants have inactive nucleases, i.e., are “dead” Cas9 proteins. Other variant Cas9 proteins that may be used are those having a smaller molecular weight than the canonical SpCas9 (e.g., for easier delivery) or having modified or rearranged primary amino acid structure (e.g., the circular permutant formats). The base editors described herein may also comprise Cas9 equivalents, including Cas12a/Cpf1 and Cas12b proteins which are the result of convergent evolution. The napDNAbps used herein (e.g., SpCas9, Cas9 variant, or Cas9 equivalents) may also may also contain various modifications that alter/enhance their PAM specificities. Lastly, the application contemplates any Cas9, Cas9 variant, or Cas9 equivalent which has at least 70%, at least 75%, at least 80%, at least 85%, at least 90%, at least 91%, at least 92%, at least 93%, at least 94%, at least 95%, at least 96%, at least 97%, at least 98%, at least 99%, or at least 99.9% sequence identity to a reference Cas9 sequence, such as a references SpCas9 canonical sequences or a reference Cas9 equivalent (e.g., Cas12a/Cpf1).

[0375] In a particular embodiment, the Cas9 variant having expanded PAM capabilities is SpCas9 (H840A) VRQR, having the following amino acid sequence (with the V, R, Q, R substitutions relative to the SpCas9 (H840A) of SEQ ID NO: 123 shown in bold underline. In addition, the methionine residue in SpCas9 (H840) was removed for SpCas9 (H840A) VRQR) (“SpCas9-VRQR”). This SpCas9 variant possesses an altered PAM-specificity which recognizes a PAM of 5′-NGA-3′ instead of the canonical PAM of 5′-NGG-3′:

SpCas9-VRQR
(SEQ ID NO: 123)
DKKYSIGLDIGTNSVGWAVITDEYKVPSKKFKVLGNTDRHSI
KKNLIGALLFDSGETAEATRLKRTARRRYTRRKNRICYLQEI
FSNEMAKVDDSFFHRLEESFLVEEDKKHERHPIFGNIVDEVA
YHEKYPTIYHLRKKLVDSTDKADLRLIYLALAHMIKFRGHFL
IEGDLNPDNSDVDKLFIQLVQTYNQLFEENPINASGVDAKAI
LSARLSKSRRLENLIAQLPGEKKNGLFGNLIALSLGLTPNFK
SNFDLAEDAKLQLSKDTYDDDLDNLLAQIGDQYADLFLAAKN
LSDAILLSDILRVNTEITKAPLSASMIKRYDEHHQDLTLLKA
LVRQQLPEKYKEIFFDQSKNGYAGYIDGGASQEEFYKFIKPI
LEKMDGTEELLVKLNREDLLRKQRTFDNGSIPHQIHLGELHA
ILRRQEDFYPFLKDNREKIEKILTFRIPYYVGPLARGNSRFA
WMTRKSEETITPWNFEEVVDKGASAQSFIERMTNFDKNLPNE
KVLPKHSLLYEYFTVYNELTKVKYVTEGMRKPAFLSGEQKKA
IVDLLFKTNRKVTVKQLKEDYFKKIECFDSVEISGVEDRFNA
SLGTYHDLLKIIKDKDFLDNEENEDILEDIVLTLTLFEDREM
IEERLKTYAHLFDDKVMKQLKRRRYTGWGRLSRKLINGIRDK
QSGKTILDFLKSDGFANRNFMQLIHDDSLTFKEDIQKAQVSG
QGDSLHEHIANLAGSPAIKKGILQTVKVVDELVKVMGRHKPE
NIVIEMARENQTTQKGQKNSRERMKRIEEGIKELGSQILKEH
PVENTQLQNEKLYLYYLQNGRDMYVDQELDINRLSDYDVDAI
VPQSFLKDDSIDNKVLTRSDKNRGKSDNVPSEEVVKKMKNYW
RQLLNAKLITQRKFDNLTKAERGGLSELDKAGFIKRQLVETR
QITKHVAQILDSRMNTKYDENDKLIREVKVITLKSKLVSDFR
KDFQFYKVREINNYHHAHDAYLNAVVGTALIKKYPKLESEFV
YGDYKVYDVRKMIAKSEQEIGKATAKYFFYSNIMNFFKTEIT
LANGEIRKRPLIETNGETGEIVWDKGRDFATVRKVLSMPQVN
IVKKTEVQTGGFSKESILPKRNSDKLIARKKDWDPKKYGGFV
SPTVAYSVLVVAKVEKGKSKKLKSVKELLGITIMERSSFEKN
PIDFLEAKGYKEVKKDLIIKLPKYSLFELENGRKRMLASARE
LQKGNELALPSKYVNFLYLASHYEKLKGSPEDNEQKQLFVEQ
HKHYLDEIIEQISEFSKRVILADANLDKVLSAYNKHRDKPIR
EQAENIIHLFTLTNLGAPAAFKYFDTTIDRKQYRSTKEVLDA
TLIHQSITGLYETRIDLSQLGGD

[0376] In another particular embodiment, the Cas9 variant having expanded PAM capabilities is SpCas9 (H840A) VQR, having the following amino acid sequence (with the V, Q, R substitutions relative to the SpCas9 (H840A) of SEQ ID NO: 124 show in bold underline. In addition, the methionine residue in SpCas9 (H840) was removed for SpCas9 (H840A) VRQR) (“SpCas9-VQR”). This SpCas9 variant possesses an altered PAM-specificity which recognizes a PAM of 5′-NGA-3′ instead of the canonical PAM of 5′-NGG-3′:

SpCas9-VQR
(SEQ ID NO: 124)
DKKYSIGLDIGTNSVGWAVITDEYKVPSKKFKVLGNTDRHSI
KKNLIGALLFDSGETAEATRLKRTARRRYTRRKNRICYLQEI
FSNEMAKVDDSFFHRLEESFLVEEDKKHERHPIFGNIVDEVA
YHEKYPTIYHLRKKLVDSTDKADLRLIYLALAHMIKFRGHFL
IEGDLNPDNSDVDKLFIQLVQTYNQLFEENPINASGVDAKAI
LSARLSKSRRLENLIAQLPGEKKNGLFGNLIALSLGLTPNFK
SNFDLAEDAKLQLSKDTYDDDLDNLLAQIGDQYADLFLAAKN
LSDAILLSDILRVNTEITKAPLSASMIKRYDEHHQDLTLLKA
LVRQQLPEKYKEIFFDQSKNGYAGYIDGGASQEEFYKFIKPI
LEKMDGTEELLVKLNREDLLRKQRTFDNGSIPHQIHLGELHA
ILRRQEDFYPFLKDNREKIEKILTFRIPYYVGPLARGNSRFA
WMTRKSEETITPWNFEEVVDKGASAQSFIERMTNFDKNLPNE
KVLPKHSLLYEYFTVYNELTKVKYVTEGMRKPAFLSGEQKKA
IVDLLFKTNRKVTVKQLKEDYFKKIECFDSVEISGVEDRFNA
SLGTYHDLLKIIKDKDFLDNEENEDILEDIVLTLTLFEDREM
IEERLKTYAHLFDDKVMKQLKRRRYTGWGRLSRKLINGIRDK
QSGKTILDFLKSDGFANRNFMQLIHDDSLTFKEDIQKAQVSG
QGDSLHEHIANLAGSPAIKKGILQTVKVVDELVKVMGRHKPE
NIVIEMARENQTTQKGQKNSRERMKRIEEGIKELGSQILKEH
PVENTQLQNEKLYLYYLQNGRDMYVDQELDINRLSDYDVDAI
VPQSFLKDDSIDNKVLTRSDKNRGKSDNVPSEEVVKKMKNYW
RQLLNAKLITQRKFDNLTKAERGGLSELDKAGFIKRQLVETR
QITKHVAQILDSRMNTKYDENDKLIREVKVITLKSKLVSDFR
KDFQFYKVREINNYHHAHDAYLNAVVGTALIKKYPKLESEFV
YGDYKVYDVRKMIAKSEQEIGKATAKYFFYSNIMNFFKTEIT
LANGEIRKRPLIETNGETGEIVWDKGRDFATVRKVLSMPQVN
IVKKTEVQTGGFSKESILPKRNSDKLIARKKDWDPKKYGGFV
SPTVAYSVLVVAKVEKGKSKKLKSVKELLGITIMERSSFEKN
PIDFLEAKGYKEVKKDLIIKLPKYSLFELENGRKRMLASAGE
LQKGNELALPSKYVNFLYLASHYEKLKGSPEDNEQKQLFVEQ
HKHYLDEIIEQISEFSKRVILADANLDKVLSAYNKHRDKPIR
EQAENIIHLFTLTNLGAPAAFKYFDTTIDRKQYRSTKEVLDA
TLIHQSITGLYETRIDLSQLGGD

[0377] In another particular embodiment, the Cas9 variant having expanded PAM capabilities is SpCas9 (H840A) VRER, having the following amino acid sequence (with the V, R, E, R substitutions relative to the SpCas9 (H840A) of SEQ ID NO: 125 are shown in bold underline. In addition, the methionine residue in SpCas9 (H840) was removed for SpCas9 (H840A) VRER) (“SpCas9-VRER”). This SpCas9 variant possesses an altered PAM-specificity which recognizes a PAM of 5′-NGCG-3′ instead of the canonical PAM of 5′-NGG-3′:

SpCas9-VRER
(SEQ ID NO: 125)
DKKYSIGLDIGTNSVGWAVITDEYKVPSKKFKVLGNTDRHSI
KKNLIGALLFDSGETAEATRLKRTARRRYTRRKNRICYLQEI
FSNEMAKVDDSFFHRLEESFLVEEDKKHERHPIFGNIVDEVA
YHEKYPTIYHLRKKLVDSTDKADLRLIYLALAHMIKFRGHFL
IEGDLNPDNSDVDKLFIQLVQTYNQLFEENPINASGVDAKAI
LSARLSKSRRLENLIAQLPGEKKNGLFGNLIALSLGLTPNFK
SNFDLAEDAKLQLSKDTYDDDLDNLLAQIGDQYADLFLAAKN
LSDAILLSDILRVNTEITKAPLSASMIKRYDEHHQDLTLLKA
LVRQQLPEKYKEIFFDQSKNGYAGYIDGGASQEEFYKFIKPI
LEKMDGTEELLVKLNREDLLRKQRTFDNGSIPHQIHLGELHA
ILRRQEDFYPFLKDNREKIEKILTFRIPYYVGPLARGNSRFA
WMTRKSEETITPWNFEEVVDKGASAQSFIERMTNFDKNLPNE
KVLPKHSLLYEYFTVYNELTKVKYVTEGMRKPAFLSGEQKKA
IVDLLFKTNRKVTVKQLKEDYFKKIECFDSVEISGVEDRFNA
SLGTYHDLLKIIKDKDFLDNEENEDILEDIVLTLTLFEDREM
IEERLKTYAHLFDDKVMKQLKRRRYTGWGRLSRKLINGIRDK
QSGKTILDFLKSDGFANRNFMQLIHDDSLTFKEDIQKAQVSG
QGDSLHEHIANLAGSPAIKKGILQTVKVVDELVKVMGRHKPE
NIVIEMARENQTTQKGQKNSRERMKRIEEGIKELGSQILKEH
PVENTQLQNEKLYLYYLQNGRDMYVDQELDINRLSDYDVDAI
VPQSFLKDDSIDNKVLTRSDKNRGKSDNVPSEEVVKKMKNYW
RQLLNAKLITQRKFDNLTKAERGGLSELDKAGFIKRQLVETR
QITKHVAQILDSRMNTKYDENDKLIREVKVITLKSKLVSDFR
KDFQFYKVREINNYHHAHDAYLNAVVGTALIKKYPKLESEFV
YGDYKVYDVRKMIAKSEQEIGKATAKYFFYSNIMNFFKTEIT
LANGEIRKRPLIETNGETGEIVWDKGRDFATVRKVLSMPQVN
IVKKTEVQTGGFSKESILPKRNSDKLIARKKDWDPKKYGGFV
SPTVAYSVLVVAKVEKGKSKKLKSVKELLGITIMERSSFEKN
PIDFLEAKGYKEVKKDLIIKLPKYSLFELENGRKRMLASARE
LQKGNELALPSKYVNFLYLASHYEKLKGSPEDNEQKQLFVEQ
HKHYLDEIIEQISEFSKRVILADANLDKVLSAYNKHRDKPIR
EQAENIIHLFTLTNLGAPAAFKYFDTTIDRKEYRSTKEVLDA
TLIHQSITGLYETRIDLSQLGGD

[0378] In yet particular embodiment, the Cas9 variant having expanded PAM capabilities is SpCas9-NG, as reported in Nishimasu et al., “Engineered CRISPR-Cas9 nuclease with expanded targeting space,” Science, 2018, 361: 1259-1262, which is incorporated herein by reference. SpCas9-NG (VRVRFRR), having the following amino acid sequence substitutions: R1335V, L1111R, D1135V, G1218R, E1219F, A1322R, and T1337R relative to the canonical SpCas9 sequence (SEQ ID NO: 59. This SpCas9 has a relaxed PAM specificity, i.e., with activity on a PAM of NGH (wherein H=A, T, or C). See Nishimasu et al., “Engineered CRISPR-Cas9 nuclease with expanded targeting space,” Science, 2018, 361: 1259-1262, which is incorporated herein by reference.

SpCas9-NG
(SEQ ID NO: 126)
MDKKYSIGLDIGTNSVGWAVITDEYKVPSKKFKVLGNTDRHS
IKKNLIGALLFDSGETAEATRLKRTARRRYTRRKNRICYLQE
IFSNEMAKVDDSFFHRLEESFLVEEDKKHERHPIFGNIVDEV
AYHEKYPTIYHLRKKLVDSTDKADLRLIYLALAHMIKFRGHF
LIEGDLNPDNSDVDKLFIQLVQTYNQLFEENPINASGVDAKA
ILSARLSKSRRLENLIAQLPGEKKNGLFGNLIALSLGLTPNF
KSNFDLAEDAKLQLSKDTYDDDLDNLLAQIGDQYADLFLAAK
NLSDAILLSDILRVNTEITKAPLSASMIKRYDEHHQDLTLLK
ALVRQQLPEKYKEIFFDQSKNGYAGYIDGGASQEEFYKFIKP
ILEKMDGTEELLVKLNREDLLRKQRTFDNGSIPHQIHLGELH
AILRRQEDFYPFLKDNREKIEKILTFRIPYYVGPLARGNSRF
AWMTRKSEETITPWNFEEVVDKGASAQSFIERMTNFDKNLPN
EKVLPKHSLLYEYFTVYNELTKVKYVTEGMRKPAFLSGEQKK
AIVDLLFKTNRKVTVKQLKEDYFKKIECFDSVEISGVEDRFN
ASLGTYHDLLKIIKDKDFLDNEENEDILEDIVLTLTLFEDRE
MIEERLKTYAHLFDDKVMKQLKRRRYTGWGRLSRKLINGIRD
KQSGKTILDFLKSDGFANRNFMQLIHDDSLTFKEDIQKAQVS
GQGDSLHEHIANLAGSPAIKKGILQTVKVVDELVKVMGRHKP
ENIVIEMARENQTTQKGQKNSRERMKRIEEGIKELGSQILKE
HPVENTQLQNEKLYLYYLQNGRDMYVDQELDINRLSDYDVDH
IVPQSFLKDDSIDNKVLTRSDKNRGKSDNVPSEEVVKKMKNY
WRQLLNAKLITQRKFDNLTKAERGGLSELDKAGFIKRQLVET
RQITKHVAQILDSRMNTKYDENDKLIREVKVITLKSKLVSDF
RKDFQFYKVREINNYHHAHDAYLNAVVGTALIKKYPKLESEF
VYGDYKVYDVRKMIAKSEQEIGKATAKYFFYSNIMNFFKTEI
TLANGEIRKRPLIETNGETGEIVWDKGRDFATVRKVLSMPQV
NIVKKTEVQTGGFSKESIRPKRNSDKLIARKKDWDPKKYGGF
VSPTVAYSVLVVAKVEKGKSKKLKSVKELLGITIMERSSFEK
NPIDFLEAKGYKEVKKDLIIKLPKYSLFELENGRKRMLASAR
FLQKGNELALPSKYVNFLYLASHYEKLKGSPEDNEQKQLFVE
QHKHYLDEIIEQISEFSKRVILADANLDKVLSAYNKHRDKPI
REQAENIIHLFTLTNLGAPRAFKYFDTTIDRKVYRSTKEVLD
ATLIHQSITGLYETRIDLSQLGGD

[0379] In addition, any available methods may be utilized to obtain or construct a variant or mutant Cas9 protein. The term “mutation,” as used herein, refers to a substitution of a residue within a sequence, e.g., a nucleic acid or amino acid sequence, with another residue, or a deletion or insertion of one or more residues within a sequence. Mutations are typically described herein by identifying the original residue followed by the position of the residue within the sequence and by the identity of the newly substituted residue. Various methods for making the amino acid substitutions (mutations) provided herein are well known in the art, and are provided by, for example, Green and Sambrook, Molecular Cloning: A Laboratory Manual (4th ed., Cold Spring Harbor Laboratory Press, Cold Spring Harbor, N.Y. (2012)). Mutations can include a variety of categories, such as single base polymorphisms, microduplication regions, indel, and inversions, and is not meant to be limiting in any way. Mutations can include “loss-of-function” mutations which is the normal result of a mutation that reduces or abolishes a protein activity. Most loss-of-function mutations are recessive, because in a heterozygote the second chromosome copy carries an unmutated version of the gene coding for a fully functional protein whose presence compensates for the effect of the mutation. Mutations also embrace “gain-of-function” mutations, which is one which confers an abnormal activity on a protein or cell that is otherwise not present in a normal condition. Many gain-of-function mutations are in regulatory sequences rather than in coding regions, and can therefore have a number of consequences. For example, a mutation might lead to one or more genes being expressed in the wrong tissues, these tissues gaining functions that they normally lack. Because of their nature, gain-of-function mutations are usually dominant.

[0380] Mutations can be introduced into a reference Cas9 protein using site-directed mutagenesis. Older methods of site-directed mutagenesis known in the art rely on sub-cloning of the sequence to be mutated into a vector, such as an M13 bacteriophage vector, that allows the isolation of single-stranded DNA template. In these methods, one anneals a mutagenic primer (i.e., a primer capable of annealing to the site to be mutated but bearing one or more mismatched nucleotides at the site to be mutated) to the single-stranded template and then polymerizes the complement of the template starting from the 3′ end of the mutagenic primer. The resulting duplexes are then transformed into host bacteria and plaques are screened for the desired mutation. More recently, site-directed mutagenesis has employed PCR methodologies, which have the advantage of not requiring a single-stranded template. In addition, methods have been developed that do not require sub-cloning. Several issues must be considered when PCR-based site-directed mutagenesis is performed. First, in these methods it is desirable to reduce the number of PCR cycles to prevent expansion of undesired mutations introduced by the polymerase. Second, a selection must be employed in order to reduce the number of non-mutated parental molecules persisting in the reaction. Third, an extended-length PCR method is preferred in order to allow the use of a single PCR primer set. And fourth, because of the non-template-dependent terminal extension activity of some thermostable polymerases it is often necessary to incorporate an end-polishing step into the procedure prior to blunt-end ligation of the PCR-generated mutant product.

[0381] Mutations may also be introduced by directed evolution processes, such as phage-assisted continuous evolution (PACE) or phage-assisted noncontinuous evolution (PANCE). The term “phage-assisted continuous evolution (PACE),” as used herein, refers to continuous evolution that employs phage as viral vectors. The general concept of PACE technology has been described, for example, in International PCT Application, PCT/US2009/056194, filed Sep. 8, 2009, published as WO 2010/028347 on Mar. 11, 2010; International PCT Application, PCT/US2011/066747, filed Dec. 22, 2011, published as WO 2012/088381 on Jun. 28, 2012; U.S. Application, U.S. Pat. No. 9,023,594, issued May 5, 2015, International PCT Application, PCT/US2015/012022, filed Jan. 20, 2015, published as WO 2015/134121 on Sep. 11, 2015, and International PCT Application, PCT/US2016/027795, filed Apr. 15, 2016, published as WO 2016/168631 on Oct. 20, 2016, the entire contents of each of which are incorporated herein by reference. Variant Cas9s may also be obtain by phage-assisted non-continuous evolution (PANCE),” which as used herein, refers to non-continuous evolution that employs phage as viral vectors. PANCE is a simplified technique for rapid in vivo directed evolution using serial flask transfers of evolving ‘selection phage’ (SP), which contain a gene of interest to be evolved, across fresh E. coli host cells, thereby allowing genes inside the host E. coli to be held constant while genes contained in the SP continuously evolve. Serial flask transfers have long served as a widely-accessible approach for laboratory evolution of microbes, and, more recently, analogous approaches have been developed for bacteriophage evolution. The PANCE system features lower stringency than the PACE system.

[0382] Any of the references noted above which relate to Cas9 or Cas9 equivalents are hereby incorporated by reference in their entireties, if not already stated so.

### III. Evolved DddA Containing Base Editors

[0383] Provided herein are evolved-DddA containing base editors.

[0384] The present disclosure provides evolved DddA proteins or fragments thereof and base editor fusion proteins comprising same. The disclosure also provide vectors and nucleic acid molecules encoding said base editor fusion proteins, kits, and methods of modifying double-stranded DNA (e.g., mtDNA) using genome editing strategies that comprise the use of a programmable DNA binding protein (“pDNAbp”) (e.g., a mitoTALE, mitoZFP, or a CRISPR/Cas9) and a double-stranded DNA deaminase (“DddA”) to precisely install nucleotide changes and/or correct pathogenic mutations in mtDNA, rather than destroying the mtDNA with double-strand breaks (DSBs). In various embodiments, these polypeptides may be combined as fusion proteins referred to as “evolved-DddA containing base editors.” In various embodiments, that base editor fusion proteins may be provided as separate components, i.e., not as a fusion protein, but rather as separate pDNAbp and DddA domains which associate in the cell to target the desired edit site.

[0385] Also provided herein are base editor fusion proteins, vectors and nucleic acid molecule encoding base editor fusion proteins, kits, and methods of modifying any double-stranded DNA (e.g., genomic DNA) using genome editing strategies that comprise the use of a programmable DNA binding protein (“pDNAbp”) (e.g., a mitoTALE, mitoZFP, or a CRISPR/Cas9) and a double-stranded DNA deaminase (“DddA”) to precisely install nucleotide changes and/or correct pathogenic mutations in double-stranded DNA, rather than destroying the DNA with double-strand breaks (DSBs). In various embodiments, that base editor fusion proteins may be provided as separate components, i.e., not as a fusion protein, but rather as separate pDNAbp and DddA domains which associate in the cell to target the desired edit site.

[0386] The present disclosure provides evolved-DddA containing base editors, pDNAbp polypeptides, DddA polypeptides, nucleic acid molecules encoding the pDNAbp polypeptides, DddA polypeptides, and fusion proteins described herein, expression vectors comprising the nucleic acid molecules, cells comprising the nucleic acid molecules, expression vectors, and/or pDNAbp polypeptides, DddA polypeptides, or fusion proteins, pharmaceutical compositions comprising the polypeptides, fusion proteins, nucleic acid molecules, vectors, or the cells described herein, and kits comprising the polypeptides, fusion proteins, nucleic acid molecules, vectors, or the cells described herein for modifying mtDNA by base editing.

[0387] In some embodiments, the Evolved DddA-containing base editors comprise a pDNAbp (e.g., a mitoTALE, mitoZFP, or a CRISPR/Cas) and a DddAs (or inactive fragment there). In other embodiments, the Evolved DddA-containing base editors comprise separately expressed pDNAbps and DddAs, which may be co-localized at a desired target site through the use of split-intein sequences, RNA-protein recruitment systems, or other elements that facilitate the co-localization of separately expressed elements to a target site. In various other embodiments, the fusion proteins and/or the separately expressed pDNAbps and DddAs become translocated into the mitochondria. To effect translocation, the fusion proteins and/or the separately expressed pDNAbps and DddAs can comprise one or more mitochondrial targeting sequences (MTS).

[0388] In still other embodiments, the Evolved DddA-containing base editors comprise a Evolved DddA domain which has been inactivated. In one embodiment, this inactivation can be achieved by engineering a whole DddA polypeptide into two or more fragments, each alone which is inactive and non-toxic to a cell. When the DddA inactive fragments become co-localization in the cell, e.g., inside the mitochondria, the fragments reconstitute the deaminase activity. The co-localization of the DddA fragments can be effectuated by fusing each DddA fragment to a separate pDNAbp that binds on either one side or the other of a target deamination site. For example, the embodiments depicted in FIGS. 1A-1F show that splitting the DddA at a split site into two inactive DddA fragments (e.g., “DddA half^{A}” and “DddA half^{B}”) result in a non-toxic form of DddA. FIG. 1B shows that each of the inactive DddA fragments may be separately expressed as a fusion protein with a pDNAbp which binds to separate target sites on either side of a target deamination site. In FIG. 1B, these target sites are represented by “target site A” and “target site B”. By binding the pDNAbp domain of each of the fusion protein to their respective sites, the inactive DddA fragments become co-localized at the desired deamination site, thereby restoring the deaminase activity of the original DddA enzyme. FIGS. 1C, 1D, and 1E show this arrangement in the context of a mitoTALE, mitoZFP, and a Cas9/sgRNA complex as the pDNAbp domain of the evolved-DddA containing base editors.

[0389] In certain embodiments, the reconstituted activity of the co-localized two or more fragments can comprise at least 5%, at least 10%, at least 15%, at least 20%, at least 25%, at least 30%, at least 35%, at least 40%, at least 45%, at least 50%, at least 55%, at least 60%, at least 65%, at least 70%, at least 71%, at least 72%, at least 73%, at least 74%, at least 75%, at least 76%, at least 77%, at least 78%, at least 79%, at least 80%, at least 81%, at least 82%, at least 83%, at least 84%, at least 85%, at least 86%, at least 87%, at least 88%, at least 89%, at least 90%, at least 91%, at least 92%, at least 93%, at least 94%, at least 95%, at least 96%, at least 97%, at least 98%, at least 99%, at least 99.5%, or at least 99.9% of the deaminase activity of a wildtype DddA.

[0390] In terms of the spacing between the target site A and target site B from the site of deamination, any suitable spacing may be used, and which may be further dependent on the length of the linkers (if present) between the pDNAbp and the DddA domains, as well as the properties of the DddA domains. If the target nucleobase site (C on the deamination strand or a G:C nucleobase pair if referring to both strands) is assigned an arbitrary value of 0, then 3′-most position of target site A, in various embodiments, may be spaced at least 1 nucleotide upstream of the target G:C nucleobase pair, or at least 2, 3, 4, 5, 6, 7, 8, 9, 10, 11, 12, 13, 14, 15, 16, 17, 18, 19, 20, 21, 22, 23, 24, 25, 26, 27, 28, 29, 30, 31, 32, 33, 34, 35, 36, 37, 38, 39, 40, 41, 42, 43, 44, 45, 46, 47, 48, 49, 50, 51, 52, 53, 54, 55, 56, 57, 58, 59, 60, 61, 62, 63, 64, 65, 66, 67, 68, 69, 70, 71, 72, 73, 74, 75, 76, 77, 78, 79, 80, 81, 82, 83, 84, 85, 86, 87, 88, 89, 90, 91, 92, 93, 94, 95, 96, 97, 98, 99, or 100 nucleotides upstream of the G:C nucleobase pair (or otherwise the target site of deamination). Likewise, the 3′-most position of target site B (i.e., which is on the opposite strand in this instance), may be spaced at least 1 nucleotide upstream of the target G:C nucleobase pair, or at least 2, 3, 4, 5, 6, 7, 8, 9, 10, 11, 12, 13, 14, 15, 16, 17, 18, 19, 20, 21, 22, 23, 24, 25, 26, 27, 28, 29, 30, 31, 32, 33, 34, 35, 36, 37, 38, 39, 40, 41, 42, 43, 44, 45, 46, 47, 48, 49, 50, 51, 52, 53, 54, 55, 56, 57, 58, 59, 60, 61, 62, 63, 64, 65, 66, 67, 68, 69, 70, 71, 72, 73, 74, 75, 76, 77, 78, 79, 80, 81, 82, 83, 84, 85, 86, 87, 88, 89, 90, 91, 92, 93, 94, 95, 96, 97, 98, 99, or 100 nucleotides upstream of the G:C nucleobase pair (or otherwise the target site of deamination).

[0391] Looking at FIG. 1B-1F as a point of reference, it is also contemplated herein that target site A and target site B may be on the same strand of DNA. That is, the inactive DddA fragments may become co-localized at the desired site of deamination by using a pair of evolved-DddA containing base editor fusion proteins having pDNAbp components (e.g., mitoTALEs, mitoZFP, Cas9 domains) that both bind to target sites A and B on the same strand. In the case where a pair of Evolved DddA-containing base editors bind to the same strand of DNA at separate target sites, the strand of DNA containing the target sites can be the same strand at the site of deamination, or the strand can be the opposite strand. So long as the inactive DddA fragments become co-localized at the intended site of deamination, the pair of base editor fusion proteins may bind to target sites on the same strands or opposite strands, and when binding to the same strand, the target sites can be the same or the opposite strand as the strand having the site of deamination.

[0392] In certain embodiments, the DddA can be separated into two fragments by dividing the DddA at a split site. A “split site” refers to a position between two adjacent amino acids (in a wildtype DddA amino acid sequence) that marks a point of division of a DddA. In certain embodiments, the DddA can have a least one split site, such that once divided at that split site, the DddA forms an N-terminal fragment and a C-terminal fragment. The N-terminal and C-terminal fragments can be the same or difference sizes (or lengths), wherein the size and/or polypeptide length depends on the location or position of the split site. As used herein, reference to a “fragment” of DddA (or any other polypeptide) can be referred equivalently as a “portion.” Thus, a DddA which is divided at a split site can form an N-terminal portion and a C-terminal portion. Preferably, the N-terminal fragment (or portion) and the C-terminal fragment (or portion) or DddA do not have a deaminase activity.

[0393] In various embodiments, a DddA may be split into two or more inactive fragments by directly cleaving the DddA at one or more split sites. Direct cleaving can be carried out by a protease (e.g., trypsin) or other enzyme or chemical reagent. In certain embodiments, such chemical cleavage reactions can be designed to be site-selective (e.g., Elashal and Raj, “Site-selective chemical cleavage of peptide bonds,” Chemical Communications, 2016, Vol. 52, pages 6304-6307, the contents of which are incorporated herein by reference.) In other embodiments, chemical cleavage reactions can be designed to be non-selective and/or occur in a random fashion.

[0394] In other embodiments, the two or more inactive DddA fragments can be engineered as separately expressed polypeptides. For instance, for a DddA having one split site, the N-terminal DddA fragment could be engineered from a first nucleotide sequence that encodes the N-terminal DddA fragment (which extends from the N-terminus of the DddA up to and including the residue on the amino-terminal side of the split site). In such an example, the C-terminal DddA fragment could be engineered from a second nucleotide sequence that encodes the C-terminal DddA fragment (which extends from the carboxy-terminus of the split site up to including the natural C-terminus of the DddA protein). The first and second nucleotide sequences could be on the same or different nucleotide molecules (e.g., the same or different expression vectors).

[0395] In various embodiments, that N-terminal portion of the DddA may be referred to as “DddA-N half” and the C-terminal portion of the DddA may be referred to as the “DddA-C half.” Reference to the term “half” does not connote the requirement that the DddA-N and DddA-C portions are identically half of the size and/or sequence length of a complete DddA, or that the split site is required to be at the mid point of the complete DddA polypeptide. To the contrary, and as noted above, the split site can be between any pair of residues in the DddA polypeptide, thereby giving rise to half portions which are unequal in size and/or sequence length. In certain embodiments, the split site is within a loop region of the DddA.

[0396] Accordingly, in one aspect, the disclosure relates to a pair of fusion proteins useful for making modifications to the sequence of mitochondrial DNA (e.g., mtDNA). The pair of fusion proteins, in some embodiments, can comprise a first fusion protein comprising a first pDNAbp (e.g., a mitoTALE, mitoZFP, or a CRISPR/Cas9) and a first portion or fragment of a DddA, and a second fusion protein comprising a second pDNAbp (e.g., mitoTALE, mitoZFP, or a CRISPR/Cas9) and a second portion or fragment of a DddA, such that the first and the second portions of the DddA reconstitute a DddA upon co-localization in a cell and/or mitochondria. In certain embodiments, that first portion of the DddA is an N-terminal fragment of a DddA and the second portion of the DddA is C-terminal fragment of a DddA. In other embodiments, the first portion of the DddA is a C-terminal fragment of a DddA and the second portion of the DddA is an N-terminal fragment of a DddA. In this aspect, the structure of the pair of fusion proteins can be, for example:
[0397] [pDNAbp]-[DddA half^{A}] and [pDNAbp]-[DddA half^{B}];
[0398] [DddA-half^{A}]-[pDNAbp] and [DddA-half^{B}]-[pDNAbp];
[0399] [pDNAbp]-[DddA half^{A}] and [DddA-half^{B}]-[pDNAbp]; or
[0400] [DddA-half^{A}]-[pDNAbp] and [pDNAbp]-[DddA half^{B}], wherein “A” or “B” can be the N-terminal or C-terminal half of DddA.

[0401] In another aspect, the disclosure relates to a pair of fusion proteins useful for making modifications to the sequence of mitochondrial DNA (e.g., mtDNA). The pair of fusion proteins can comprise a first fusion protein comprising a first mitoTALE and a first portion or fragment of a DddA, and a second fusion protein comprising a second mitoTALE and a second portion or fragment of a DddA, such that the first and the second portions of the DddA, upon co-localization in a cell and/or mitochondria, are reconstituted an active DddA. In certain embodiments, that first portion of the DddA is an N-terminal fragment of a DddA and the second portion of the DddA is C-terminal fragment of a DddA. In other embodiments, the first portion of the DddA is a C-terminal fragment of a DddA and the second portion of the DddA is an N-terminal fragment of a DddA. In this aspect, the structure of the pair of fusion proteins can be, for example:
[0402] [mitoTALE]-[DddA half^{A}] and [mitoTALE]-[DddA half^{B}];
[0403] [DddA-half^{A}]-[pDNAbp] and [DddA-half^{B}]-[mitoTALE];
[0404] [mitoTALE]-[DddA half^{A}] and [DddA-half^{B}]-[mitoTALE]; or
[0405] [DddA-half^{A}]-[mitoTALE] and [mitoTALE]-[DddA half^{B}], wherein “A” or “B” can be the N-terminal or C-terminal half of DddA.

[0406] In yet another aspect, the disclosure relates to a pair of fusion proteins useful for making modifications to the sequence of mitochondrial DNA (e.g., mtDNA). The pair of fusion proteins can comprise a first fusion protein comprising a first mitoZFP and a first portion or fragment of a DddA, and a second fusion protein comprising a second mitoZFP and a second portion or fragment of a DddA, such that the first and the second portions of the DddA, upon co-localization in a cell and/or mitochondria, are reconstituted an active DddA. In certain embodiments, that first portion of the DddA is an N-terminal fragment of a DddA and the second portion of the DddA is C-terminal fragment of a DddA. In other embodiments, the first portion of the DddA is a C-terminal fragment of a DddA and the second portion of the DddA is an N-terminal fragment of a DddA. In this aspect, the structure of the pair of fusion proteins can be, for example:
[0407] [mitoZFP]-[DddA half^{A}] and [mitoZFP]-[DddA half^{B}];
[0408] [DddA-half^{A}]-[pDNAbp] and [DddA-half^{B}]-[mitoZFP];
[0409] [mitoZFP]-[DddA half^{A}] and [DddA-half^{B}]-[mitoZFP]; or
[0410] [DddA-half^{A}]-[mitoZFP] and [mitoZFP]-[DddA half^{B}], wherein “A” or “B” can be the N-terminal or C-terminal half of DddA.

[0411] In yet another aspect, the disclosure relates to a pair of fusion proteins useful for making modifications to the sequence of mitochondrial DNA (e.g., mtDNA). The pair of fusion proteins can comprise a first fusion protein comprising a first Cas9 and a first portion or fragment of a DddA, and a second fusion protein comprising a second Cas9 and a second portion or fragment of a DddA, such that the first and the second portions of the DddA, upon co-localization in a cell and/or mitochondria, are reconstituted an active DddA. In certain embodiments, that first portion of the DddA is an N-terminal fragment of a DddA (i.e., “DddA half^{A}” as shown in FIGS. 1A-1E) and the second portion of the DddA is C-terminal fragment of a DddA (i.e., “DddA half^{B}” as shown in FIGS. 1A-1E). In other embodiments, the first portion of the DddA is an C-terminal fragment of a DddA and the second portion of the DddA is an N-terminal fragment of a DddA. In this aspect, the structure of the pair of fusion proteins can be, for example:
[0412] [Cas9]-[DddA half^{A}] and [Cas9]-[DddA half^{B}];
[0413] [DddA-half^{A}]-[Cas9] and [DddA-half^{B}]-[Cas9];
[0414] [Cas9]-[DddA half^{A}] and [DddA-half^{B}]-[Cas9]; or
[0415] [DddA-half^{A}]-[Cas9] and [Cas9]-[DddA half^{B}], wherein “A” or “B” can be the N-terminal or C-terminal half of DddA.

[0416] In each instance above of “]-[” can be in reference to a linker sequence.

[0417] In addition, the fusion proteins may have any suitable architecture, include any those depicted in FIG. 1F.

[0418] In some embodiments, a first fusion protein comprises, a first mitochondrial transcription activator-like effector (mitoTALE) domain and a first portion of a DNA deaminase effector (DddA).

[0419] In some embodiments, the first portion of the DddA comprises an N-terminal truncated DddA. In some embodiments, the first mitoTALE is configured to bind a first nucleic acid sequence proximal to a target nucleotide. In some embodiments, the first portion of a DddA is linked to the remainder of the first fusion protein by the C-terminus of the first portion of a DddA.

[0420] In one aspect, the present disclosure provides mitochondrial DNA editor fusion proteins for use in editing mitochondrial DNA. As used herein, these mitochondrial DNA editor fusion proteins may be referred to as “mtDNA editors” or “mtDNA editing systems.”

[0421] In various embodiments, the mtDNA editors described herein comprise (1) a programmable DNA binding protein (“pDNAbp”) (e.g., a mitoTALE domain, mitoZFP domain, or a CRISPR/Cas9 domain) and a double-stranded DNA deaminase domain, which is capable of carrying out a deamination of a nucleobase at a target site associated with the binding site of the programmable DNA binding protein (pDNAbp).

[0422] In some embodiments, the double-stranded DNA deaminase is split into two inactive half portions, with each half portion being fused to a programmable DNA binding protein that binds to a nucleotide sequence either upstream or downstream of a target edit site, and wherein once in the mitochondria, the two half portions (i.e., the N-terminal half and the C-terminal half) reassociate at the target edit site by the co-localization of the programmable DNA binding proteins to binding sites upstream and downstream of the target edit site to be acted on by the DNA deaminase. The reassociation of the two half portions of the double-stranded DNA deaminase restores the deaminase activity at the target edit site. In other embodiments, the double-stranded DNA deaminase can initially be set in an inactive state which can be induced when in the mitochondria. The double-stranded DNA deaminase is preferably delivered initially in an inactive form in order to avoid toxicity inherent with the protein. Any means to regulate the toxic properties of the double-stranded DNA deaminase until such time as the activity is desired to be activated (e.g., in the mitochondria) is contemplated.

[0423] The Evolved DddA-containing base editors described herein contemplate fusion proteins comprising a mitoTALE and a Evolved DddA domain or fragment or portion thereof (e.g., an N-terminal or C-terminal fragment or portion of a DddA), and optionally the joining of the two by a linker. The application contemplates any suitable mitoTALE and a Evolved DddA domain to be combined in a single fusion protein. Examples of mitoTALEs and DddA domains are each defined herein.

[0424] In some embodiments, a first fusion protein comprises a first portion of a DddA fused (e.g., attached) to a first mitoTALE. In some embodiments, a second fusion protein comprises a second portion of a DddA fused (e.g., attached) to a second mitoTALE. In some embodiments, the first fusion protein comprises a first portion of a DddA linked to the remainder of the first fusion protein by the C-terminus of the first portion of a DddA. In some embodiments, a second fusion protein comprises a second portion of a DddA linked to the remainder of the second fusion protein by the C-terminus of the second portion of a DddA.

[0425] In some embodiments, the first fusion protein comprises a first mitoTALE to bind a target nucleic acid sequence proximal (as defined herein above) to the target nucleotide. In some embodiments, the second fusion protein comprises a mitoTALE to bind a target nucleic acid sequence proximal to the nucleotide complementary to the target nucleotide. In some embodiments, the first and second mitoTALEs are configured to bind proximally to the same target nucleotide (or nucleotide complementary thereto, as described herein above). In some embodiments, the first and second fusion proteins comprise mitoTALEs configured to bind first and second target nucleic acid sequences such that the first and second portions of DddA can dimerize (i.e., re-assemble) at or near the target nucleotide, such that re-assembled first and second portions of a DddA regain, at least partially, the native activity (e.g., deamination) of a full-length DddA. In some embodiments, the first and second fusion proteins comprise mitoTALEs configured to bind first and second target nucleic acid sequences such that that the first and second portions of a DddA can dimerize (i.e., re-assemble) at or near the target nucleotide, such that the target nucleotide is affected by activity of a re-assembled first and second portions of a DddA. Any suitable architecture of the fusion proteins comprising mitoTALEs are contemplated, and shows in FIG. 1F.

[0426] The Evolved DddA-containing base editors described herein also contemplate fusion proteins comprising a mitoZF and a Evolved DddA domain or fragment or portion thereof (e.g., an N-terminal or C-terminal fragment or portion of a DddA), and optionally the joining of the two by a linker. The application contemplates any suitable mitoZF and a Evolved DddA domain to be combined in a single fusion protein. Examples of mitoZFs and DddA domains are each defined herein.

[0427] In some embodiments, a first fusion protein comprises a first portion of a DddA fused (e.g., attached) to a first mitoZF. In some embodiments, a second fusion protein comprises a second portion of a DddA fused (e.g., attached) to a second mitoZF. In some embodiments, the first fusion protein comprises a first portion of a DddA linked to the remainder of the first fusion protein by the C-terminus of the first portion of a DddA. In some embodiments, a second fusion protein comprises a second portion of a DddA linked to the remainder of the second fusion protein by the C-terminus of the second portion of a DddA.

[0428] In some embodiments, the first fusion protein comprises a first mitoZF to bind a target nucleic acid sequence proximal (as defined herein above) to the target nucleotide. In some embodiments, the second fusion protein comprises a mitoZF to bind a target nucleic acid sequence proximal to the nucleotide complementary to the target nucleotide. In some embodiments, the first and second mitoZFs are configured to bind proximally to the same target nucleotide (or nucleotide complementary thereto, as described herein above). In some embodiments, the first and second fusion proteins comprise mitoZFs configured to bind first and second target nucleic acid sequences such that the first and second portions of DddA can dimerize (i.e., re-assemble) at or near the target nucleotide, such that re-assembled first and second portions of a DddA regain, at least partially, the native activity (e.g., deamination) of a full-length DddA. In some embodiments, the first and second fusion proteins comprise mitoTALEs configured to bind first and second target nucleic acid sequences such that that the first and second portions of a DddA can dimerize (i.e., re-assemble) at or near the target nucleotide, such that the target nucleotide is affected by activity of a re-assembled first and second portions of a DddA. Any suitable architecture of the fusion proteins comprising mitoZFs are contemplated, and shows in FIG. 1F.

[0429] In some embodiments, the first fusion protein comprises the amino acid sequence of any one of SEQ ID NOs.: 5, 10-12, 147, 149, 151, 154, 156, 161, 165, 167, and 170-173. In some embodiments, the first fusion protein comprises an amino acid sequence with 75% or greater percent identity (e.g., 80% or greater, 85% or greater, 90% or greater, 95% or greater, 96% or greater, 97% or greater, 98% or greater, 99% or greater, 99.5% or greater, 99.9% or greater percent identity) any one of SEQ ID NOs.: 5, 10-12, 147, 149, 151, 154, 156, 161, 165, 167, and 170-173. In some embodiments, the second fusion protein comprises the amino acid sequence of any one of SEQ ID NOs.: 5, 10-12, 147, 149, 151, 154, 156, 161, 165, 167, and 170-173. In some embodiments, the second fusion protein comprises an amino acid sequence with 75% or greater percent identity (e.g., 80% or greater, 85% or greater, 90% or greater, 95% or greater, 96% or greater, 97% or greater, 98% or greater, 99% or greater, 99.5% or greater, 99.9% or greater percent identity) to any one of SEQ ID NOs.: 5, 10-12, 147, 149, 151, 154, 156, 161, 165, 167, and 170-173.

[0430] In some embodiments, the first and second fusion protein form pairs which result from the targeting of a similar target nucleotide, or which first and second portion of a DddA form a pair of portions which can re-assemble (e.g., dimerize) to form a protein with, at least partially, the activity of a full-length DddA (e.g., deamination). In some embodiments, the pair of fusion proteins comprise a first fusion protein comprising the first fusion protein of any one of and a second fusion protein comprising the second fusion protein wherein the first mitoTALE of the first fusion protein is configured to bind a first nucleic acid sequence proximal to a target nucleotide and the second mitoTALE of the second fusion protein is configured to bind a second nucleic acid sequence proximal to a nucleotide opposite the target nucleotide. In some embodiments, the first nucleic acid sequence is upstream of the target nucleotide and the second nucleic acid sequence is upstream of a nucleic acid of the complementary nucleotide of the target nucleotide. In some embodiments, the re-assembly (i.e., dimerization) of the first and second fusion proteins facilitate deamination of the target nucleotide.

### Base Editors Comprising MitoTALES

[0431] The Evolved DddA-containing base editors described herein contemplate fusion proteins comprising a mitoTALE and an evolved DddA domain or fragment or portion thereof (e.g., an N-terminal or C-terminal fragment or portion of a DddA), and optionally the joining of the two by a linker. The application contemplates any suitable mitoTALE and a Evolved DddA domain to be combined in a single fusion protein. Examples of mitoTALEs and DddA domains are each defined herein.

[0432] In some embodiments, the Evolved DddA-containing base editors comprise DddA domains which are DdCBE, i.e., DddA which deaminates a C. Examples of general architecture of Evolved DddA-containing base editors comprising DdCBEs and mitoTALEs and their amino acid and nucleotide sequences are represented by SEQ ID NOs: 11-15 and 144-170.

[0433] All right-side halves of DdCBEs have the general architecture of (from N- to C-terminus): COX8A MTS-3×FLAG-mitoTALE-2aa linker-DddAₜₒₓ half-4aa linker-1×-UGI-ATP5B 3′UTR

[0434] All left-side halves of DdCBEs have the general architecture of (from N- to C-terminus): SOD2 MTS-3×HA-mitoTALE-2aa linker-DddAₜₒₓ half-4aa linker-1×-UGI-SOD2 3′UTR

[0435] Other exemplary Evolved DddA-containing base editors may comprise DdCBE/mitoTALE fusion proteins represented by SEQ ID NOs: 5, 10-12, 147, 149, 151, 154, 156, 161, 165, 167, and 170-173.:

[0436] All right-side halves of DdCBEs have the general architecture of (from N- to C-terminus): COX8A MTS-3×FLAG-mitoTALE-2aa linker-DddAtox half-4aa linker-1×-UGI-ATP5B 3′UTR

[0437] All left-side halves of DdCBEs have the general architecture of (from N- to C-terminus): SOD2 MTS-3×HA-mitoTALE-2aa linker-DddAtox half-4aa linker-1×-UGI-SOD2 3′UTR

ND6-DdCBE: Left mitoTALE-G1397-DddAtox-N-1x-UGI (Note: Terminal
NG RVD recognizes a mismatched T instead of a G in the reference
genome)
(SEQ ID NO: 5)
MALSRAVCGTSRQLAPVLGYLGSRQKHSLPDYPYDVPDYAGYPYDVPDYAGYPYDVPDYAMDIADL
RTLGYSQQQQEKIKPKVRSTVAQHHEALVGHGFTHAHIVALSQHPAALGTVAVKYQDMIAALPEATH
EAIVGVGKQWSGARALEALLTVAGELRGPPLQLDTGQLLKIAKRGGVTAVEAVHAWRNALTGAPLN
LTPQQVVAIASNNGGKQALETVQRLLPVLCQAHGLTPEQVVAIASNIGGKQALETVQALLPVLCQAH
GLTPEQVVAIASHDGGKQALETVQRLLPVLCQAHGLTPEQVVAIASHDGGKQALETVQRLLPVLCQA
HGLTPEQVVAIASHDGGKQALETVQRLLPVLCQAHGLTPEQVVAIASHDGGKQALETVQRLLPVLCQ
AHGLTPEQVVAIASHDGGKQALETVQRLLPVLCQAHGLTPEQVVAIASNIGGKQALETVQALLPVLC
QAHGLTPQQVVAIASNGGGKQALETVQRLLPVLCQAHGLTPQQVVAIASNGGGRPALESIVAQLSRP
DPALAALTNDHLVALACLGGRPALDAVKKGLGGSGSYALGPYQISAPQLPAYNGQTVGTFYYVNDA
GGLESKVFSSGGPTPYPNYANAGHVEGQSALFMRDNGISEGLVFHNNPEGTCGFCVNMTETLLPENA
KMTVVPPEGSGGSTNLSDIIEKETGKQLVIQESILMLPEEVEEVIGNKPESDILVHTAYDESTDENVMLL
TSDAPEYKPWALVIQDSNGENKIKML**
ND6-DdCBE: Right mitoTALE-G1397-DddAtox-N-1x-UGI (Note: Terminal
NG RVD recognizes a mismatched T instead of a G in the reference
genome. The NTD was also engineered to be permissive for A, T, C
and G nucleotides at the NO position)
(SEQ ID NO: 10)
MASVLTPLLLRGLTGSARRLPVPRAKIHSLDYKDHDGDYKDHDIDYKDDDDKMDIADLRTLGYSQQ
QQEKIKPKVRSTVAQHHEALVGHGFTHAHIVALSQHPAALGTVAVKYQDMIAALPEATHEAIVGVGK
RGAGARALEALLTVAGELRGPPLQLDTGQLLKIAKRGGVTAVEAVHAWRNALTGAPLNLTPQQVVA
IASNNGGKQALETVQRLLPVLCQAHGLTPEQVVAIASNIGGKQALETVQALLPVLCQAHGLTPQQVV
AIASNGGGKQALETVQRLLPVLCQAHGLTPQQVVAIASNNGGKQALETVQRLLPVLCQAHGLTPQQV
VAIASNNGGKQALETVQRLLPVLCQAHGLTPEQVVAIASHDGGKQALETVQRLLPVLCQAHGLTPQQ
VVAIASNGGGKQALETVQRLLPVLCQAHGLTPEQVVAIASNIGGKQALETVQALLPVLCQAHGLTPQ
QVVAIASNGGGKQALETVQRLLPVLCQAHGLTPQQVVAIASNGGGKQALETVQRLLPVLCQAHGLTP
QQVVAIASNGGGRPALESIVAQLSRPDPALAALTNDHLVALACLGGRPALDAVKKGLGGSAIPVKRG
ATGETKVFTGNSNSPKSPTKGGCSGGSTNLSDIIEKETGKQLVIQESILMLPEEVEEVIGNKPESDILVHT
AYDESTDENVMLLTSDAPEYKPWALVIQDSNGENKIKML**
ND1-DdCBE Right mitoTALE repeat
(SEQ ID NO: 147)
DIADLRTLGYSQQQQEKIKPKVRSTVAQHHEALVGHGFTHAHIVALSQHPAALGTVAVKYQDMIAAL
PEATHEAIVGVGKQWSGARALEALLTVAGELRGPPLQLDTGQLLKIAKRGGVTAVEAVHAWRNALT
GAPLNLTPEQVVAIASNNGGKQALETVQALLPVLCQAHGLTPQQVVAIASNIGGKQALETVQRLLPVL
CQAHGLTPQQVVAIASNNGGKQALETVQRLLPVLCQAHGLTPEQVVAIASNGGGKQALETVQALLPV
LCQAHGLTPEQVVAIASNGGGKQALETVQALLPVLCQAHGLTPEQVVAIASNGGGKQALETVQALLP
VLCQAHGLTPEQVVAIASNNGGKQALETVQRLLPVLCQAHGLTPEQVVAIASNIGGKQALETVQALL
PVLCQAHGLTPEQVVAIASNGGGKQALETVQRLLPVLCQAHGLTPEQVVAIASNNGGKQALETVQAL
LPVLCQAHGLTPEQVVAIASHDGGKQALETVQALLPVLCQAHGLTPEQVVAIASNGGGKQALETVQA
LLPVLCQAHGLTPEQVVAIASHDGGKQALETVQRLLPVLCQAHGLTPQQVVAIASNIGGKQALETVQ
RLLPVLCQAHGLTPEQVVAIASHDGGKQALETVQALLPVLCQAHGLTPQQVVAIASHDGGKQALETV
QRLLPVLCQAHGLTPQQVVAIASHDGGKQALETVQRLLPVLCQAHGLTPQQVVAIASNGGGRPALESI
VAQLSRPDPALAALTNDHLVALACLGGRPALDAVKKGLG
ND1-DdCBE Left mitoTALE repeat
(SEQ ID NO: 149)
DIADLRTLGYSQQQQEKIKPKVRSTVAQHHEALVGHGFTHAHIVALSQHPAALGTVAVKYQDMIAAL
PEATHEAIVGVGKQWSGARALEALLTVAGELRGPPLQLDTGQLLKIAKRGGVTAVEAVHAWRNALT
GAPLNLTPEQVVAIASHDGGKQALETVQALLPVLCQAHGLTPQQVVAIASNGGGKQALETVQRLLPV
LCQAHGLTPQQVVAIASNIGGKQALETVQRLLPVLCQAHGLTPEQVVAIASNNGGKQALETVQALLP
VLCQAHGLTPEQVVAIASHDGGKQALETVQALLPVLCQAHGLTPEQVVAIASHDGGKQALETVQALL
PVLCQAHGLTPEQVVAIASNGGGKQALETVQRLLPVLCQAHGLTPEQVVAIASNIGGKQALETVQAL
LPVLCQAHGLTPEQVVAIASNNGGKQALETVQRLLPVLCQAHGLTPEQVVAIASHDGGKQALETVQA
LLPVLCQAHGLTPEQVVAIASHDGGKQALETVQALLPVLCQAHGLTPEQVVAIASNNGGKQALETVQ
ALLPVLCQAHGLTPEQVVAIASNGGGKQALETVQRLLPVLCQAHGLTPQQVVAIASNGGGKQALETV
QRLLPVLCQAHGLTPQQVVAIASNGGGRPALESIVAQLSRPDPALAALTNDHLVALACLGGRPALDA
VKKGLG
ND2-DdCBE Right mitoTALE repeat
(SEQ ID NO: 151)
DIADLRTLGYSQQQQEKIKPKVRSTVAQHHEALVGHGFTHAHIVALSQHPAALGTVAVKYQDMIAAL
PEATHEAIVGVGKQWSGARALEALLTVAGELRGPPLQLDTGQLLKIAKRGGVTAVEAVHAWRNALT
GAPLNLTPEQVVAIASNIGGKQALETVQALLPVLCQAHGLTPQQVVAIASNNGGKQALETVQRLLPVL
CQAHGLTPQQVVAIASNIGGKQALETVQRLLPVLCQAHGLTPEQVVAIASNIGGKQALETVQALLPVL
CQAHGLTPEQVVAIASHDGGKQALETVQALLPVLCQAHGLTPEQVVAIASNGGGKQALETVQALLPV
LCQAHGLTPEQVVAIASNNGGKQALETVQRLLPVLCQAHGLTPEQVVAIASHDGGKQALETVQALLP
VLCQAHGLTPEQVVAIASNGGGKQALETVQRLLPVLCQAHGLTPEQVVAIASNIGGKQALETVQALL
PVLCQAHGLTPEQVVAIASNGGGKQALETVQALLPVLCQAHGLTPEQVVAIASNGGGKQALETVQAL
LPVLCQAHGLTPEQVVAIASNIGGKQALETVQRLLPVLCQAHGLTPQQVVAIASNGGGKQALETVQR
LLPVLCQAHGLTPQQVVAIASNGGGRPALESIVAQLSRPDPALAALTNDHLVALACLGGRPALDAVK
KGLG
ND2-DdCBE Left mitoTALE repeat
(SEQ ID NO: 171)
DIADLRTLGYSQQQQEKIKPKVRSTVAQHHEALVGHGFTHAHIVALSQHPAALGTVAVKYQDMIAAL
PEATHEAIVGVGKQWSGARALEALLTVAGELRGPPLQLDTGQLLKIAKRGGVTAVEAVHAWRNALT
GAPLNLTPEQVVAIASHDGGKQALETVQALLPVLCQAHGLTPQQVVAIASNGGGKQALETVQRLLPV
LCQAHGLTPQQVVAIASNGGGKQALETVQRLLPVLCQAHGLTPEQVVAIASNIGGKQALETVQALLP
VLCQAHGLTPEQVVAIASNNGGKQALETVQALLPVLCQAHGLTPEQVVAIASHDGGKQALETVQALL
PVLCQAHGLTPEQVVAIASNIGGKQALETVQRLLPVLCQAHGLTPEQVVAIASNGGGKQALETVQAL
LPVLCQAHGLTPEQVVAIASNIGGKQALETVQRLLPVLCQAHGLTPEQVVAIASHDGGKQALETVQA
LLPVLCQAHGLTPEQVVAIASNGGGKQALETVQALLPVLCQAHGLTPEQVVAIASHDGGKQALETVQ
ALLPVLCQAHGLTPEQVVAIASHDGGKQALETVQRLLPVLCQAHGLTPQQVVAIASNGGGKQALETV
QRLLPVLCQAHGLTPEQVVAIASHDGGKQALETVQALLPVLCQAHGLTPEQVVAIASNIGGKQALET
VQALLPVLCQAHGLTPEQVVAIASNIGGKQALETVQALLPVLCQAHGLTPQQVVAIASNGGGRPALES
IVAQLSRPDPALAALTNDHLVALACLGGRPALDAVKKGLG
ND4-DdCBE Right mitoTALE repeat
(SEQ ID NO: 154)
DIADLRTLGYSQQQQEKIKPKVRSTVAQHHEALVGHGFTHAHIVALSQHPAALGTVAVKYQDMIAAL
PEATHEAIVGVGKQWSGARALEALLTVAGELRGPPLQLDTGQLLKIAKRGGVTAVEAVHAWRNALT
GAPLNLTPEQVVAIASHDGGKQALETVQALLPVLCQAHGLTPQQVVAIASHDGGKQALETVQRLLPV
LCQAHGLTPQQVVAIASNGGGKQALETVQRLLPVLCQAHGLTPEQVVAIASNNGGKQALETVQALLP
VLCQAHGLTPEQVVAIASNGGGKQALETVQALLPVLCQAHGLTPEQVVAIASNIGGKQALETVQALL
PVLCQAHGLTPEQVVAIASNIGGKQALETVQRLLPVLCQAHGLTPEQVVAIASNNGGKQALETVQAL
LPVLCQAHGLTPEQVVAIASNGGGKQALETVQRLLPVLCQAHGLTPEQVVAIASNIGGKQALETVQR
LLPVLCQAHGLTPEQVVAIASNNGGKQALETVQALLPVLCQAHGLTPEQVVAIASNNGGKQALETVQ
ALLPVLCQAHGLTPEQVVAIASNIGGKQALETVQALLPVLCQAHGLTPEQVVAIASNNGGKQALETV
QRLLPVLCQAHGLTPQQVVAIASNIGGKQALETVQRLLPVLCQAHGLTPQQVVAIASNNGGKQALET
VQRLLPVLCQAHGLTPQQVVAIASNGGGRPALESIVAQLSRPDPALAALTNDHLVALACLGGRPALD
AVKKGLG
ND4-DdCBE Left mitoTALE repeat
(SEQ ID NO: 156)
DIADLRTLGYSQQQQEKIKPKVRSTVAQHHEALVGHGFTHAHIVALSQHPAALGTVAVKYQDMIAAL
PEATHEAIVGVGKQWSGARALEALLTVAGELRGPPLQLDTGQLLKIAKRGGVTAVEAVHAWRNALT
GAPLNLTPEQVVAIASNNGGKQALETVQALLPVLCQAHGLTPQQVVAIASHDGGKQALETVQRLLPV
LCQAHGLTPQQVVAIASNGGGKQALETVQRLLPVLCQAHGLTPEQVVAIASNIGGKQALETVQALLP
VLCQAHGLTPEQVVAIASNNGGKQALETVQALLPVLCQAHGLTPEQVVAIASNGGGKQALETVQALL
PVLCQAHGLTPEQVVAIASNIGGKQALETVQRLLPVLCQAHGLTPEQVVAIASNIGGKQALETVQALL
PVLCQAHGLTPEQVVAIASHDGGKQALETVQRLLPVLCQAHGLTPEQVVAIASHDGGKQALETVQAL
LPVLCQAHGLTPEQVVAIASNIGGKQALETVQALLPVLCQAHGLTPEQVVAIASHDGGKQALETVQA
LLPVLCQAHGLTPEQVVAIASNNGGKQALETVQRLLPVLCQAHGLTPQQVVAIASNGGGKQALETVQ
RLLPVLCQAHGLTPEQVVAIASNGGGKQALETVQALLPVLCQAHGLTPEQVVAIASHDGGKQALETV
QALLPVLCQAHGLTPQQVVAIASNGGGRPALESIVAQLSRPDPALAALTNDHLVALACLGGRPALDA
VKKGLG
ND5.1-DdCBE Right mitoTALE repeat
(SEQ ID NO: 11)
DIADLRTLGYSQQQQEKIKPKVRSTVAQHHEALVGHGFTHAHIVALSQHPAALGTVAVKYQDMIAAL
PEATHEAIVGVGKQWSGARALEALLTVAGELRGPPLQLDTGQLLKIAKRGGVTAVEAVHAWRNALT
GAPLNLTPQQVVAIASHDGGKQALETVQRLLPVLCQAHGLTPEQVVAIASNGGGKQALETVQRLLPV
LCQAHGLTPQQVVAIASNGGGKQALETVQRLLPVLCQAHGLTPEQVVAIASNGGGKQALETVQALLP
VLCQAHGLTPQQVVAIASNNGGKQALETVQRLLPVLCQAHGLTPQQVVAIASNNGGKQALETVQRL
LPVLCQAHGLTPEQVVAIASNIGGKQALETVQRLLPVLCQAHGLTPQQVVAIASNNGGKQALETVQR
LLPVLCQAHGLTPQQVVAIASNGGGKQALETVQRLLPVLCQAHGLTPEQVVAIASNIGGKQALETVQ
RLLPVLCQAHGLTPEQVVAIASNNGGKQALETVQRLLPVLCQAHGLTPQQVVAIASNIGGKQALETV
QRLLPVLCQAHGLTPQQVVAIASNIGGRPALESIVAQLSRPDPALAALTNDHLVALACLGGRPALDAV
KKGLG
ND5.1-DdCBE Left mitoTALE repeat
(SEQ ID NO: 172)
DIADLRTLGYSQQQQEKIKPKVRSTVAQHHEALVGHGFTHAHIVALSQHPAALGTVAVKYQDMIAAL
PEATHEAIVGVGKQWSGARALEALLTVAGELRGPPLQLDTGQLLKIAKRGGVTAVEAVHAWRNALT
GAPLNLTPEQVVAIASNIGGKQALETVQALLPVLCQAHGLTPQQVVAIASNNGGKQALETVQRLLPVL
CQAHGLTPQQVVAIASHDGGKQALETVQRLLPVLCQAHGLTPEQVVAIASNIGGKQALETVQALLPV
LCQAHGLTPEQVVAIASNGGGKQALETVQALLPVLCQAHGLTPEQVVAIASNGGGKQALETVQALLP
VLCQAHGLTPEQVVAIASNIGGKQALETVQRLLPVLCQAHGLTPEQVVAIASNNGGKQALETVQALL
PVLCQAHGLTPEQVVAIASHDGGKQALETVQRLLPVLCQAHGLTPEQVVAIASNIGGKQALETVQAL
LPVLCQAHGLTPEQVVAIASNNGGKQALETVQALLPVLCQAHGLTPEQVVAIASNNGGKQALETVQA
LLPVLCQAHGLTPEQVVAIASNIGGKQALETVQRLLPVLCQAHGLTPQQVVAIASNIGGKQALETVQR
LLPVLCQAHGLTPQQVVAIASNGGGRPALESIVAQLSRPDPALAALTNDHLVALACLGGRPALDAVK
KGLG
ND5.2-DdCBE Right mitoTALE repeat (Note: Terminal NG RVD
recognizes a mismatched T instead of a G in the reference genome)
(SEQ ID NO: 161)
DIADLRTLGYSQQQQEKIKPKVRSTVAQHHEALVGHGFTHAHIVALSQHPAALGTVAVKYQDMIAAL
PEATHEAIVGVGKQWSGARALEALLTVAGELRGPPLQLDTGQLLKIAKRGGVTAVEAVHAWRNALT
GAPLNLTPQQVVAIASNNGGKQALETVQRLLPVLCQAHGLTPEQVVAIASHDGGKQALETVQRLLPV
LCQAHGLTPQQVVAIASNGGGKQALETVQRLLPVLCQAHGLTPEQVVAIASNIGGKQALETVQALLP
VLCQAHGLTPQQVVAIASNNGGKQALETVQRLLPVLCQAHGLTPQQVVAIASNNGGKQALETVQRL
LPVLCQAHGLTPEQVVAIASHDGGKQALETVQRLLPVLCQAHGLTPQQVVAIASNGGGKQALETVQR
LLPVLCQAHGLTPQQVVAIASNNGGKQALETVQRLLPVLCQAHGLTPEQVVAIASHDGGKQALETVQ
RLLPVLCQAHGLTPEQVVAIASHDGGKQALETVQRLLPVLCQAHGLTPEQVVAIASNIGGKQALETV
QALLPVLCQAHGLTPEQVVAIASNIGGKQALETVQALLPVLCQAHGLTPQQVVAIASNGGGKQALET
VQRLLPVLCQAHGLTPQQVVAIASNNGGKQALETVQRLLPVLCQAHGLTPQQVVAIASNGGGRPALE
SIVAQLSRPDPALAALTNDHLVALACLGGRPALDAVKKGLG
ND5.2-DdCBE Left mitoTALE repeat
(SEQ ID NO: 173)
DIADLRTLGYSQQQQEKIKPKVRSTVAQHHEALVGHGFTHAHIVALSQHPAALGTVAVKYQDMIAAL
PEATHEAIVGVGKQWSGARALEALLTVAGELRGPPLQLDTGQLLKIAKRGGVTAVEAVHAWRNALT
GAPLNLTPEQVVAIASHDGGKQALETVQALLPVLCQAHGLTPQQVVAIASNIGGKQALETVQRLLPVL
CQAHGLTPQQVVAIASNIGGKQALETVQRLLPVLCQAHGLTPEQVVAIASNIGGKQALETVQALLPVL
CQAHGLTPEQVVAIASNIGGKQALETVQALLPVLCQAHGLTPEQVVAIASHDGGKQALETVQALLPV
LCQAHGLTPEQVVAIASHDGGKQALETVQRLLPVLCQAHGLTPEQVVAIASNIGGKQALETVQALLP
VLCQAHGLTPEQVVAIASNGGGKQALETVQRLLPVLCQAHGLTPEQVVAIASNIGGKQALETVQALL
PVLCQAHGLTPEQVVAIASHDGGKQALETVQALLPVLCQAHGLTPEQVVAIASHDGGKQALETVQAL
LPVLCQAHGLTPEQVVAIASNGGGKQALETVQRLLPVLCQAHGLTPQQVVAIASHDGGKQALETVQR
LLPVLCQAHGLTPQQVVAIASNGGGRPALESIVAQLSRPDPALAALTNDHLVALACLGGRPALDAVK
KGLG
ND5.3-DdCBE Right mitoTALE repeat
(SEQ ID NO: 165)
DIADLRTLGYSQQQQEKIKPKVRSTVAQHHEALVGHGFTHAHIVALSQHPAALGTVAVKYQDMIAAL
PEATHEAIVGVGKQWSGARALEALLTVAGELRGPPLQLDTGQLLKIAKRGGVTAVEAVHAWRNALT
GAPLNLTPQQVVAIASNIGGKQALETVQRLLPVLCQAHGLTPEQVVAIASNIGGKQALETVQRLLPVL
CQAHGLTPQQVVAIASNNGGKQALETVQRLLPVLCQAHGLTPEQVVAIASNIGGKQALETVQALLPV
LCQAHGLTPQQVVAIASNGGGKQALETVQRLLPVLCQAHGLTPQQVVAIASNGGGKQALETVQRLLP
VLCQAHGLTPEQVVAIASNIGGKQALETVQRLLPVLCQAHGLTPQQVVAIASNNGGKQALETVQRLL
PVLCQAHGLTPQQVVAIASNGGGKQALETVQRLLPVLCQAHGLTPEQVVAIASNIGGKQALETVQRL
LPVLCQAHGLTPEQVVAIASNGGGKQALETVQRLLPVLCQAHGLTPQQVVAIASNNGGKQALETVQR
LLPVLCQAHGLTPQQVVAIASNNGGKQALETVQRLLPVLCQAHGLTPQQVVAIASNGGGRPALESIV
AQLSRPDPALAALTNDHLVALACLGGRPALDAVKKGLG
ND5.3-DdCBE Left mitoTALE repeat
(SEQ ID NO: 167)
DIADLRTLGYSQQQQEKIKPKVRSTVAQHHEALVGHGFTHAHIVALSQHPAALGTVAVKYQDMIAAL
PEATHEAIVGVGKQWSGARALEALLTVAGELRGPPLQLDTGQLLKIAKRGGVTAVEAVHAWRNALT
GAPLNLTPEQVVAIASHDGGKQALETVQALLPVLCQAHGLTPQQVVAIASNIGGKQALETVQRLLPVL
CQAHGLTPQQVVAIASNNGGKQALETVQRLLPVLCQAHGLTPEQVVAIASNGGGKQALETVQALLPV
LCQAHGLTPEQVVAIASNGGGKQALETVQALLPVLCQAHGLTPEQVVAIASHDGGKQALETVQALLP
VLCQAHGLTPEQVVAIASNGGGKQALETVQRLLPVLCQAHGLTPEQVVAIASNGGGKQALETVQALL
PVLCQAHGLTPEQVVAIASHDGGKQALETVQRLLPVLCQAHGLTPEQVVAIASNIGGKQALETVQAL
LPVLCQAHGLTPEQVVAIASNIGGKQALETVQALLPVLCQAHGLTPEQVVAIASNIGGKQALETVQAL
LPVLCQAHGLTPEQVVAIASNGGGKQALETVQRLLPVLCQAHGLTPQQVVAIASNIGGKQALETVQR
LLPVLCQAHGLTPQQVVAIASNGGGRPALESIVAQLSRPDPALAALTNDHLVALACLGGRPALDAVK
KGLG
ATP8-DdCBE Right mitoTALE repeat (Note: Terminal NG RVD recognizes
a mismatched T instead of a C in the reference genome)
(SEQ ID NO: 12)
DIADLRTLGYSQQQQEKIKPKVRSTVAQHHEALVGHGFTHAHIVALSQHPAALGTVAVKYQDMIAAL
PEATHEAIVGVGKQWSGARALEALLTVAGELRGPPLQLDTGQLLKIAKRGGVTAVEAVHAWRNALT
GAPLNLTPQQVVAIASNIGGKQALETVQRLLPVLCQAHGLTPEQVVAIASNGGGKQALETVQRLLPVL
CQAHGLTPQQVVAIASNNGGKQALETVQRLLPVLCQAHGLTPEQVVAIASNNGGKQALETVQALLPV
LCQAHGLTPQQVVAIASNNGGKQALETVQRLLPVLCQAHGLTPQQVVAIASHDGGKQALETVQRLLP
VLCQAHGLTPEQVVAIASNGGGKQALETVQRLLPVLCQAHGLTPQQVVAIASNGGGKQALETVQRLL
PVLCQAHGLTPQQVVAIASNGGGKQALETVQRLLPVLCQAHGLTPEQVVAIASNNGGKQALETVQRL
LPVLCQAHGLTPEQVVAIASNNGGKQALETVQRLLPVLCQAHGLTPQQVVAIASNGGGRPALESIVA
QLSRPDPALAALTNDHLVALACLGGRPALDAVKKGLG
ATP8-DdCBE Left mitoTALE repeat
(SEQ ID NO: 170)
DIADLRTLGYSQQQQEKIKPKVRSTVAQHHEALVGHGFTHAHIVALSQHPAALGTVAVKYQDMIAAL
PEATHEAIVGVGKQWSGARALEALLTVAGELRGPPLQLDTGQLLKIAKRGGVTAVEAVHAWRNALT
GAPLNLTPEQVVAIASNIGGKQALETVQALLPVLCQAHGLTPQQVVAIASNGGGKQALETVQRLLPVL
CQAHGLTPQQVVAIASNGGGKQALETVQRLLPVLCQAHGLTPEQVVAIASNIGGKQALETVQALLPV
LCQAHGLTPEQVVAIASNIGGKQALETVQALLPVLCQAHGLTPEQVVAIASNIGGKQALETVQALLPV
LCQAHGLTPEQVVAIASHDGGKQALETVQRLLPVLCQAHGLTPEQVVAIASNIGGKQALETVQALLP
VLCQAHGLTPEQVVAIASHDGGKQALETVQRLLPVLCQAHGLTPEQVVAIASNIGGKQALETVQALL
PVLCQAHGLTPEQVVAIASNIGGKQALETVQALLPVLCQAHGLTPEQVVAIASNIGGKQALETVQALL
PVLCQAHGLTPEQVVAIASHDGGKQALETVQRLLPVLCQAHGLTPQQVVAIASNGGGKQALETVQRL
LPVLCQAHGLTPEQVVAIASNIGGKQALETVQALLPVLCQAHGLTPQQVVAIASNGGGRPALESIVAQ
LSRPDPALAALTNDHLVALACLGGRPALDAVKKGLG

### Base Editors Comprising MitoZFs

[0438] The Evolved DddA-containing base editors described herein contemplate fusion proteins comprising a mitoZF and an Evolved DddA domain or fragment or portion thereof (e.g., an N-terminal or C-terminal fragment or portion of a DddA), and optionally the joining of the two by a linker. The application contemplates any suitable mitoZF and an Evolved DddA domain to be combined in a single fusion protein. Examples of mitoZFs and DddA domains are each defined herein.

[0439] In some embodiments, the Evolved DddA-containing base editors comprise DddA domains which are DdCBE, i.e., DddA which deaminates a C. Examples of general architecture of Evolved DddA-containing base editors comprising DdCBEs and mitoZFs and their amino acid and nucleotide sequences are as follows:

| | | |
|---|---|---|
| R8 v6 | MLGFVGRVAAAPASGALRRLTPSASLPP | MTS |
| | AQLLLRAAPTAVHPVRDYAAQDYKDD | MLGFVGRVAAAPASGALRRLTPSASLPPAQLLL |
| | DDKVDEMTKKFGTLTIHDTEKGSLQKK | RAAPTAVHPVRDYAAQ (SEQ ID NO: 230) |
| | LEELELDAAMAERPFQCDICMRNFSTSG | FLAG tag |
| | SLSRHIRTHTGEKPFQCDICMRNFSQSGS | DYKDDDDK (SEQ ID NO: 347) |
| | LTRHIRTHTGSEKPFQCDICMRNFSRSDA | NES |
| | LSQHIRTHTGEKPFQCDICMRNFSRNDN | VDEMTKKFGTLTIHDTEK (SEQ ID NO: 232) |
| | RITHIRTHTGEKPFQCDICMRNFSRSDHL | Linker |
| | TQHTKIHLRGSGGGGSGGSGGSGSYAL | GS |
| | GPYQISAPQLPAYNGQTVGTFYYVNDA | NES2 |
| | GGLESKVFSSGGPTPYPNYANAGHVEG | LQKKLEELELD (SEQ ID NO: 233) |
| | QSALFMRDNGISEGLVFHNNPEGTCGFC | Linker |
| | VNMTETLLPENAKMTVVPPEGSGGSTN | AA |
| | LSDIIEKETGKQLVIQESILMLPEEVEEVI | ZF (R8) |
| | GNKPESDILVHTAYDESTDENVMLLTSD | MAERPFQCDICMRNFSTSGSLSRHIRTHTGEKPF |
| | APEYKPWALVIQDSNGENKIKMLGSGA | QCDICMRNFSQSGSLTRHIRTHTGSEKPFQCDIC |
| | TNFSLLKQAGDVEENPGPMASVLTPLLL | MRNFSRSDALSQHIRTHTGEKPFQCDICMRNFS |
| | RGLTGSARRLPVPRAKIHSLGSTNLSDII | RNDNRITHIRTHTGEKPFQCDICMRNFSRSDHL |
| | EKETGKQLVIQESILMLPEEVEEVIGNKP | TQHTKIHLR (SEQ ID NO: 224) |
| | ESDILVHTAYDESTDENVMLLTSDAPEY | Linker |
| | KPWALVIQDSNGENKIKML | GSGGGGSGGSGGS (SEQ ID NO: 222) |
| | (SEQ ID NO: 174) | Split DddA (DddA-G1397N) |
| | | GSYALGPYQISAPQLPAYNGQTVGTFYYVNDA |
| | | GGLESKVFSSGGPTPYPNYANAGHVEGQSALF |
| | | MRDNGISEGLVFHNNPEGTCGFCVNMTETLLP |
| | | ENAKMTVVPPEG (SEQ ID NO: 340) |
| | | Linker |
| | | SGGS (SEQ ID NO: 221) |
| | | UGI |
| | | TNLSDIIEKETGKQLVIQESILMLPEEVEEVIGNK |
| | | PESDILVHTAYDESTDENVMLLTSDAPEYKPW |
| | | ALVIQDSNGENKIKML (SEQ ID NO: 378) |
| | | Linker |
| | | GSG |
| | | P2A Peptide |
| | | ATNFSLLKQAGDVEENPGP |
| | | (SEQ ID NO: 223) |
| | | MTS |
| | | MASVLTPLLLRGLTGSARRLPVPRAKIHSL |
| | | (SEQ ID NO: 231) |
| | | Linker |
| | | GS |
| | | UGI |
| | | TNLSDIIEKETGKQLVIQESILMLPEEVEEVIGNK |
| | | PESDILVHTAYDESTDENVMLLTSDAPEYKPW |
| | | ALVIQDSNGENKIKML (SEQ ID NO: 378) |
| 5xZnF-4- | MLGFVGRVAAAPASGALRRLTPSASLPP | MTS |
| R8 v6 | AQLLLRAAPTAVHPVRDYAAQDYKDD | MLGFVGRVAAAPASGALRRLTPSASLPPAQLLL |
| | DDKVDEMTKKFGTLTIHDTEKGSLQKK | RAAPTA VHPVRDYAAQ (SEQ ID NO: 230) |
| | LEELELDAAMAERPFQCDICMRNFSQAS | FLAG tag |
| | NLISHIRTHTGEKPFQCDICMRNFSTSHS | DYKDDDDK (SEQ ID NO: 347) |
| | LTEHIRTHTGSEKPFQCDICMRNFSERSH | NES |
| | LREHIRTHTGEKPFQCDICMRNFSQSGN | VDEMTKKFGTLTIHDTEK (SEQ ID NO: 232) |
| | LTEHIRTHTGEKPFQCDICMRNFSSKKA | Linker |
| | LTEHTKIHLRGSGGGGSGGSGGSAIPVK | GS |
| | RGATGETKVFTGNSNSPKSPTKGGCSGG | NES2 |
| | STNLSDIIEKETGKQLVIQESILMLPEEVE | LQKKLEELELD (SEQ ID NO: 233) |
| | EVIGNKPESDILVHTAYDESTDENVMLL | Linker |
| | TSDAPEYKPWALVIQDSNGENKIKMLGS | AA |
| | GATNFSLLKQAGDVEENPGPMASVLTP | ZF (5xZnF-4-R8) |
| | LLLRGLTGSARRLPVPRAKIHSLGSTNLS | MAERPFQCDICMRNFSQASNLISHIRTHTGEKPF |
| | DIIEKETGKQLVIQESILMLPEEVEEVIGN | QCDICMRNFSTSHSLTEHIRTHTGSEKPFQCDIC |
| | KPESDILVHTAYDESTDENVMLLTSDAP | MRNFSERSHLREHIRTHTGEKPFQCDICMRNFS |
| | EYKPWALVIQDSNGENKIKML | QSGNLTEHIRTHTGEKPFQCDICMRNFSSKKAL |
| | (SEQ ID NO: 175) | TEHTKIHLR (SEQ ID NO: 225) |
| | | Linker |
| | | GSGGGGSGGSGGS (SEQ ID NO: 222) |
| | | Split DddA (DddA-G1397C) |
| | | AIPVKRGATGETKVFTGNSNSPKSPTKGGC |
| | | (SEQ ID NO: 341) |
| | | Linker |
| | | SGGS (SEQ ID NO: 221) |
| | | UGI |
| | | TNLSDIIEKETGKQLVIQESILMLPEEVEEVIGNK |
| | | PESDILVHTAYDESTDENVMLLTSDAPEYKPW |
| | | ALVIQDSNGENKIKML (SEQ ID NO: 378) |
| | | Linker |
| | | GSG |
| | | P2A Peptide |
| | | ATNFSLLKQAGDVEENPGP (SEQ ID NO: 223) |
| | | MTS |
| | | MASVLTPLLLRGLTGSARRLPVPRAKIHSL |
| | | (SEQ ID NO: 231) |
| | | Linker |
| | | GS |
| | | UGI |
| | | TNLSDIIEKETGKQLVIQESILMLPEEVEEVIGNK |
| | | PESDILVHTAYDESTDENVMLLTSDAPEYKPW |
| | | ALVIQDSNGENKIKML (SEQ ID NO: 378) |
| 5xZnF-10- | MLGFVGRVAAAPASGALRRLTPSASLPP | MTS |
| R8 v6 | AQLLLRAAPTAVHPVRDYAAQDYKDD | MLGFVGRVAAAPASGALRRLTPSASLPPAQLLL |
| | DDKVDEMTKKFGTLTIHDTEKGSLQKK | RAAPTAVHPVRDYAAQ (SEQ ID NO: 230) |
| | LEELELDAAMAERPFQCDICMRNFSQAS | FLAG tag |
| | NLISHIRTHTGEKPFQCDICMRNFSQRAN | DYKDDDDK (SEQ ID NO: 347) |
| | LRAHIRTHTGSEKPFQCDICMRNFSQAS | NES |
| | NLISHIRTHTGEKPFQCDICMRNFSTSHS | VDEMTKKFGTLTIHDTEK (SEQ ID NO: 232) |
| | LTEHIRTHTGEKPFQCDICMRNFSERSHL | Linker |
| | REHTKIHLRGSGGGGSGGSGGSAIPVKR | GS |
| | GATGETKVFTGNSNSPKSPTKGGCSGGS | NES2 |
| | TNLSDIIEKETGKQLVIQESILMLPEEVEE | LQKKLEELELD (SEQ ID NO: 233) |
| | VIGNKPESDILVHTAYDESTDENVMLLT | Linker |
| | SDAPEYKPWALVIQDSNGENKIKMLGS | AA |
| | GATNFSLLKQAGDVEENPGPMASVLTP | ZF (5xZnF-10-R8) |
| | LLLRGLTGSARRLPVPRAKIHSLGSTNLS | MAERPFQCDICMRNFSQASNLISHIRTHTGEKPF |
| | DIIEKETGKQLVIQESILMLPEEVEEVIGN | QCDICMRNFSQRANLRAHIRTHTGSEKPFQCDI |
| | KPESDILVHTAYDESTDENVMLLTSDAP | CMRNFSQASNLISHIRTHTGEKPFQCDICMRNFS |
| | EYKPWALVIQDSNGENKIKML | TSHSLTEHIRTHTGEKPFQCDICMRNFSERSHLR |
| | (SEQ ID NO: 176) | EHTKIHLR (SEQ ID NO: 226) |
| | | Linker |
| | | GSGGGGSGGSGGS (SEQ ID NO: 222) |
| | | Split DddA (DddA-G1397C) |
| | | AIPVKRGATGETKVFTGNSNSPKSPTKGGC |
| | | (SEQ ID NO: 341) |
| | | Linker |
| | | SGGS (SEQ ID NO: 221) |
| | | UGI |
| | | TNLSDIIEKETGKQLVIQESILMLPEEVEEVIGNK |
| | | PESDILVHTAYDESTDENVMLLTSDAPEYKPW |
| | | ALVIQDSNGENKIKML (SEQ ID NO: 378) |
| | | Linker |
| | | GSG |
| | | P2A Peptide |
| | | ATNFSLLKQAGDVEENPGP (SEQ ID NO: 223) |
| | | MTS |
| | | MASVLTPLLLRGLTGSARRLPVPRAKIHSL |
| | | (SEQ ID NO: 231) |
| | | Linker |
| | | GS |
| | | UGI |
| | | TNLSDIIEKETGKQLVIQESILMLPEEVEEVIGNK |
| | | PESDILVHTAYDESTDENVMLLTSDAPEYKPW |
| | | ALVIQDSNGENKIKML (SEQ ID NO: 378) |
| R13-1 v6 | MLGFVGRVAAAPASGALRRLTPSASLPP | MTS |
| | AQLLLRAAPTAVHPVRDYAAQDYKDD | MLGFVGRVAAAPASGALRRLTPSASLPPAQLLL |
| | DDKVDEMTKKFGTLTIHDTEKGSLQKK | RAAPTAVHPVRDYAAQ (SEQ ID NO: 230) |
| | LEELELDAAMAERPFQCDICMRNFSRSD | FLAG tag |
| | NLSTHIRTHTGEKPFQCDICMRNFSDRS | DYKDDDDK (SEQ ID NO: 347) |
| | DLSRHIRTHTGEKPFQCDICMRNFSQSG | NES |
| | DLTRHIRTHTGSEKPFQCDICMRNFSRSD | VDEMTKKFGTLTIHDTEK (SEQ ID NO: 232) |
| | SLSAHIRTHTGEKPFQCDICMRNFSQKA | Linker |
| | TRITHTKIHLRGSGGGGSGGSGGSGSYA | GS |
| | LGPYQISAPQLPAYNGQTVGTFYYVND | NES2 |
| | AGGLESKVFSSGGPTPYPNYANAGHVE | LQKKLEELELD (SEQ ID NO: 233) |
| | GQSALFMRDNGISEGLVFHNNPEGTCGF | Linker |
| | CVNMTETLLPENAKMTVVPPEGSGGST | AA |
| | NLSDIIEKETGKQLVIQESILMLPEEVEEV | ZF (R13-1) |
| | IGNKPESDILVHTAYDESTDENVMLLTS | MAERPFQCDICMRNFSRSDNLSTHIRTHTGEKP |
| | DAPEYKPWALVIQDSNGENKIKMLGSG | FQCDICMRNFSDRSDLSRHIRTHTGEKPFQCDIC |
| | ATNFSLLKQAGDVEENPGPMASVLTPLL | MRNFSQSGDLTRHIRTHTGSEKPFQCDICMRNF |
| | LRGLTGSARRLPVPRAKIHSLGSTNLSDI | SRSDSLSAHIRTHTGEKPFQCDICMRNFSQKAT |
| | IEKETGKQLVIQESILMLPEEVEEVIGNK | RITHTKIHLR (SEQ ID NO: 227) |
| | PESDILVHTAYDESTDENVMLLTSDAPE | Linker |
| | YKPWALVIQDSNGENKIKML | GSGGGGSGGSGGS (SEQ ID NO: 222) |
| | (SEQ ID NO: 177) | Split DddA (DddA-G1397N) |
| | | GSYALGPYQISAPQLPAYNGQTVGTFYYVNDA |
| | | GGLESKVFSSGGPTPYPNYANAGHVEGQSALF |
| | | MRDNGISEGLVFHNNPEGTCGFCVNMTETLLP |
| | | ENAKMTVVPPEG (SEQ ID NO: 340) |
| | | Linker |
| | | SGGS (SEQ ID NO: 221) |
| | | UGI |
| | | TNLSDIIEKETGKQLVIQESILMLPEEVEEVIGNK |
| | | PESDILVHTAYDESTDENVMLLTSDAPEYKPW |
| | | ALVIQDSNGENKIKML (SEQ ID NO: 378) |
| | | Linker |
| | | GSG |
| | | P2A Peptide |
| | | ATNFSLLKQAGDVEENPGP (SEQ ID NO: 223) |
| | | MTS |
| | | MASVLTPLLLRGLTGSARRLPVPRAKIHSL |
| | | (SEQ ID NO: 231) |
| | | Linker |
| | | GS |
| | | UGI |
| | | TNLSDIIEKETGKQLVIQESILMLPEEVEEVIGNK |
| | | PESDILVHTAYDESTDENVMLLTSDAPEYKPW |
| | | ALVIQDSNGENKIKML (SEQ ID NO: 378) |
| 5xZnF-9- | MLGFVGRVAAAPASGALRRLTPSASLPP | MTS |
| R13 v6 | AQLLLRAAPTAVHPVRDYAAQDYKDD | MLGFVGRVAAAPASGALRRLTPSASLPPAQLLL |
| | DDKVDEMTKKFGTLTIHDTEKGSLQKK | RAAPTAVHPVRDYAAQ (SEQ ID NO: 230) |
| | LEELELDAAMAERPFQCDICMRNFSQSS | FLAG tag |
| | SLVRHIRTHTGEKPFQCDICMRNFSRSD | DYKDDDDK (SEQ ID NO: 347) |
| | NLVRHIRTHTGSEKPFQCDICMRNFSQA | NES |
| | GHLASHIRTHTGEKPFQCDICMRNFSRK | LQKKLEELELD (SEQ ID NO: 233) |
| | DNLKNHIRTHTGEKPFQCDICMRNFSRK | VDEMTKKFGTLTIHDTEK |
| | DALRGHTKIHLRGSGGGGSGGSGGSAIP | (SEQ ID NO: 232) |
| | VKRGATGETKVFTGNSNSPKSPTKGGCS | Linker |
| | GGSTNLSDIIEKETGKQLVIQESILMLPEE | GS |
| | VEEVIGNKPESDILVHTAYDESTDENVM | NES2 |
| | LLTSDAPEYKPWALVIQDSNGENKIKML | Linker |
| | GSGATNFSLLKQAGDVEENPGPMASVL | AA |
| | TPLLLRGLTGSARRLPVPRAKIHSLGSTN | ZF (5xZnF-9-R13) |
| | LSDIIEKETGKQLVIQESILMLPEEVEEVI | MAERPFQCDICMRNFSQSSSLVRHIRTHTGEKP |
| | GNKPESDILVHTAYDESTDENVMLLTSD | FQCDICMRNFSRSDNLVRHIRTHTGSEKPFQCDI |
| | APEYKPWALVIQDSNGENKIKML | CMRNFSQAGHLASHIRTHTGEKPFQCDICMRNF |
| | (SEQ ID NO: 178) | SRKDNLKNHIRTHTGEKPFQCDICMRNFSRKDA |
| | | LRGHTKIHLR (SEQ ID NO: 228) |
| | | Linker |
| | | GSGGGGSGGSGGS (SEQ ID NO: 222) |
| | | Split DddA (DddA-G1397C) |
| | | AIPVKRGATGETKVFTGNSNSPKSPTKGGC |
| | | (SEQ ID NO: 341) |
| | | Linker |
| | | SGGS (SEQ ID NO: 221) |
| | | UGI |
| | | TNLSDIIEKETGKQLVIQESILMLPEEVEEVIGNK |
| | | PESDILVHTAYDESTDENVMLLTSDAPEYKPW |
| | | ALVIQDSNGENKIKML (SEQ ID NO: 378) |
| | | Linker |
| | | GSG |
| | | P2A Peptide |
| | | ATNFSLLKQAGDVEENPGP (SEQ ID NO: 223) |
| | | MTS |
| | | MASVLTPLLLRGLTGSARRLPVPRAKIHSL |
| | | (SEQ ID NO: 231) |
| | | Linker |
| | | GS |
| | | UGI |
| | | TNLSDIIEKETGKQLVIQESILMLPEEVEEVIGNK |
| | | PESDILVHTAYDESTDENVMLLTSDAPEYKPW |
| | | ALVIQDSNGENKIKML (SEQ ID NO: 378) |
| 5xZnF-12- | MLGFVGRVAAAPASGALRRLTPSASLPP | MTS |
| R13 v6 | AQLLLRAAPTAVHPVRDYAAQDYKDD | MLGFVGRVAAAPASGALRRLTPSASLPPAQLLL |
| | DDKVDEMTKKFGTLTIHDTEKGSLQKK | RAAPTAVHPVRDYAAQ (SEQ ID NO: 230) |
| | LEELELDAAMAERPFQCDICMRNFSRSD | FLAG tag |
| | HLTTHIRTHTGEKPFQCDICMRNFSQSSS | DYKDDDDK (SEQ ID NO: 347) |
| | LVRHIRTHTGSEKPFQCDICMRNFSRSD | NES |
| | NLVRHIRTHTGEKPFQCDICMRNFSQAG | VDEMTKKFGTLTIHDTEK (SEQ ID NO: 232) |
| | HLASHIRTHTGEKPFQCDICMRNFSRKD | Linker |
| | NLKNHTKIHLRGSGGGGSGGSGGSAIPV | GS |
| | KRGATGETKVFTGNSNSPKSPTKGGCSG | NES2 |
| | GSTNLSDIIEKETGKQLVIQESILMLPEEV | LQKKLEELELD (SEQ ID NO: 233) |
| | EEVIGNKPESDILVHTAYDESTDENVML | Linker |
| | LTSDAPEYKPWALVIQDSNGENKIKML | AA |
| | GSGATNFSLLKQAGDVEENPGPMASVL | ZF (5xZnF-12-R13) |
| | TPLLLRGLTGSARRLPVPRAKIHSLGSTN | MAERPFQCDICMRNFSRSDHLTTHIRTHTGEKP |
| | LSDIIEKETGKQLVIQESILMLPEEVEEVI | FQCDICMRNFSQSSSLVRHIRTHTGSEKPFQCDI |
| | GNKPESDILVHTAYDESTDENVMLLTSD | CMRNFSRSDNLVRHIRTHTGEKPFQCDICMRNF |
| | APEYKPWALVIQDSNGENKIKML | SQAGHLASHIRTHTGEKPFQCDICMRNFSRKDN |
| | (SEQ ID NO: 179) | LKNHTKIHLR (SEQ ID NO: 229) |
| | | Linker |
| | | GSGGGGSGGSGGS (SEQ ID NO: 222) |
| | | Split DddA (DddA-G1397C) |
| | | AIPVKRGATGETKVFTGNSNSPKSPTKGGC |
| | | (SEQ ID NO: 341) |
| | | Linker |
| | | SGGS (SEQ ID NO: 221) |
| | | UGI |
| | | TNLSDIIEKETGKQLVIQESILMLPEEVEEVIGNK |
| | | PESDILVHTAYDESTDENVMLLTSDAPEYKPW |
| | | ALVIQDSNGENKIKML (SEQ ID NO: 378) |
| | | Linker |
| | | GSG |
| | | P2A Peptide |
| | | ATNFSLLKQAGDVEENPGP (SEQ ID NO: 223) |
| | | MTS |
| | | MASVLTPLLLRGLTGSARRLPVPRAKIHSL |
| | | (SEQ ID NO: 231) |
| | | Linker |
| | | GS |
| | | UGI |
| | | TNLSDIIEKETGKQLVIQESILMLPEEVEEVIGNK |
| | | PESDILVHTAYDESTDENVMLLTSDAPEYKPW |
| | | ALVIQDSNGENKIKML (SEQ ID NO: 378) |
| R8 v3 | MLGFVGRVAAAPASGALRRLTPSASLPP | MTS |
| | AQLLLRAAPTAVHPVRDYAAQDYKDD | MLGFVGRVAAAPASGALRRLTPSASLPPAQLLL |
| | DDKVDEMTKKFGTLTIHDTEKAAMAER | RAAPTAVHPVRDYAAQ (SEQ ID NO: 230) |
| | PFQCRICMRNFSTSGSLSRHIRTHTGEKP | FLAG tag |
| | FACDICGRKFAQSGSLTRHTKIHTGGQR | DYKDDDDK (SEQ ID NO: 347) |
| | PFQCRICMRNFSRSDALSQHIRTHTGEKP | NES |
| | FACDICGRKFARNDNRITHTKIHTGEKPF | VDEMTKKFGTLTIHDTEK (SEQ ID NO: 232) |
| | QCRICMRKFARSDHLTQHTKIHLRGSGG | Linker |
| | GGSGGSGGSGSYALGPYQISAPQLPAYN | AA |
| | GQTVGTFYYVNDAGGLESKVFSSGGPT | ZF (R8) |
| | PYPNYANAGHVEGQSALFMRDNGISEG | MAERPFQCRICMRNFSTSGSLSRHIRTHTGEKPF |
| | LVFHNNPEGTCGFCVNMTETLLPENAK | ACDICGRKFAQSGSLTRHTKIHTGGQRPFQCRI |
| | MTVVPPEGSGGSTNLSDIIEKETGKQLVI | CMRNFSRSDALSQHIRTHTGEKPFACDICGRKF |
| | QESILMLPEEVEEVIGNKPESDILVHTAY | ARNDNRITHTKIHTGEKPFQCRICMRKFARSDH |
| | DESTDENVMLLTSDAPEYKPWALVIQD | LTQHTKIHLR (SEQ ID NO: 400) |
| | SNGENKIKML (SEQ ID NO: 180) | Linker |
| | | GSGGGGSGGSGGS (SEQ ID NO: 222) |
| | | Split DddA (DddA-G1397N) |
| | | GSYALGPYQISAPQLPAYNGQTVGTFYYVNDA |
| | | GGLESKVFSSGGPTPYPNYANAGHVEGQSALF |
| | | MRDNGISEGLVFHNNPEGTCGFCVNMTETLLP |
| | | ENAKMTVVPPEG (SEQ ID NO: 340) |
| | | Linker |
| | | SGGS (SEQ ID NO: 221) |
| | | UGI |
| | | TNLSDIIEKETGKQLVIQESILMLPEEVEEVIGNK |
| | | PESDILVHTAYDESTDENVMLLTSDAPEYKPW |
| | | ALVIQDSNGENKIKML (SEQ ID NO: 378) |
| 5xZnF-4- | MLGFVGRVAAAPASGALRRLTPSASLPP | MTS |
| R8 v3 | AQLLLRAAPTAVHPVRDYAAQDYKDD | MLGFVGRVAAAPASGALRRLTPSASLPPAQLLL |
| | DDKVDEMTKKFGTLTIHDTEKAAMAER | RAAPTAVHPVRDYAAQ (SEQ ID NO: 230) |
| | PFQCRICMRNFSQASNLISHIRTHTGEKP | FLAG tag |
| | FACDICGRKFATSHSLTEHTKIHTGSQKP | DYKDDDDK (SEQ ID NO: 347) |
| | FQCRICMRNFSERSHLREHIRTHTGEKPF | NES |
| | ACDICGRKFAQSGNLTEHTKIHTGEKPF | VDEMTKKFGTLTIHDTEK (SEQ ID NO: 232) |
| | QCRICMRKFASKKALTEHTKIHLRGSGG | Linker |
| | GGSGGSGGSAIPVKRGATGETKVFTGNS | AA |
| | NSPKSPTKGGCSGGSTNLSDIIEKETGKQ | ZF (5xZnF-4-R8) |
| | LVIQESILMLPEEVEEVIGNKPESDILVHT | MAERPFQCRICMRNFSQASNLISHIRTHTGEKPF |
| | AYDESTDENVMLLTSDAPEYKPWALVI | ACDICGRKFATSHSLTEHTKIHTGSQKPFQCRIC |
| | QDSNGENKIKML (SEQ ID NO: 181) | MRNFSERSHLREHIRTHTGEKPFACDICGRKFA |
| | | QSGNLTEHTKIHTGEKPFQCRICMRKFASKKAL |
| | | TEHTKIHLR (SEQ ID NO: 401) |
| | | Linker |
| | | GSGGGGSGGSGGS (SEQ ID NO: 222) |
| | | Split DddA (DddA-G1397C) |
| | | AIPVKRGATGETKVFTGNSNSPKSPTKGGC |
| | | (SEQ ID NO: 341) |
| | | Linker |
| | | SGGS (SEQ ID NO: 221) |
| | | UGI |
| | | TNLSDIIEKETGKQLVIQESILMLPEEVEEVIGNK |
| | | PESDILVHTAYDESTDENVMLLTSDAPEYKPW |
| | | ALVIQDSNGENKIKML (SEQ ID NO: 378) |
| 5xZnF-10- | MLGFVGRVAAAPASGALRRLTPSASLPP | MTS |
| R8 v3 | AQLLLRAAPTAVHPVRDYAAQDYKDD | MLGFVGRVAAAPASGALRRLTPSASLPPAQLLL |
| | DDKVDEMTKKFGTLTIHDTEKAAMAER | RAAPTAVHPVRDYAAQ (SEQ ID NO: 230) |
| | PFQCRICMRNFSQASNLISHIRTHTGEKP | FLAG tag |
| | FACDICGRKFAQRANLRAHTKIHTGSQK | DYKDDDDK (SEQ ID NO: 347) |
| | PFQCRICMRNFSQASNLISHIRTHTGEKP | NES |
| | FACDICGRKFATSHSLTEHTKIHTGEKPF | VDEMTKKFGTLTIHDTEK (SEQ ID NO: 232) |
| | QCRICMRKFAERSHLREHTKIHLRGSGG | Linker |
| | GGSGGSGGSAIPVKRGATGETKVFTGNS | AA |
| | NSPKSPTKGGCSGGSTNLSDIIEKETGKQ | ZF (5xZnF-10-R8) |
| | LVIQESILMLPEEVEEVIGNKPESDILVHT | MAERPFQCRICMRNFSQASNLISHIRTHTGEKPF |
| | AYDESTDENVMLLTSDAPEYKPWALVI | ACDICGRKFAQRANLRAHTKIHTGSQKPFQCRI |
| | QDSNGENKIKML (SEQ ID NO: 182) | CMRNFSQASNLISHIRTHTGEKPFACDICGRKFA |
| | | TSHSLTEHTKIHTGEKPFQCRICMRKFAERSHLR |
| | | EHTKIHLR (SEQ ID NO: 402) |
| | | Linker |
| | | GSGGGGSGGSGGS (SEQ ID NO: 222) |
| | | Split DddA (DddA-G1397C) |
| | | AIPVKRGATGETKVFTGNSNSPKSPTKGGC |
| | | (SEQ ID NO: 341) |
| | | Linker |
| | | SGGS (SEQ ID NO: 221) |
| | | UGI |
| | | TNLSDIIEKETGKQLVIQESILMLPEEVEEVIGNK |
| | | PESDILVHTAYDESTDENVMLLTSDAPEYKPW |
| | | ALVIQDSNGENKIKML (SEQ ID NO: 378) |
| R13-1 v3 | MLGFVGRVAAAPASGALRRLTPSASLPP | MTS |
| | AQLLLRAAPTAVHPVRDYAAQDYKDD | MLGFVGRVAAAPASGALRRLTPSASLPPAQLLL |
| | DDKVDEMTKKFGTLTIHDTEKAAMAER | RAAPTAVHPVRDYAAQ (SEQ ID NO: 230) |
| | PFQCRICMRNFSRSDNLSTHIRTHTGEKP | FLAG tag |
| | FACDICGRKFADRSDLSRHTKIHTGEKPF | DYKDDDDK (SEQ ID NO: 347) |
| | QCRICMRKFAQSGDLTRHTKIHTGSQKP | NES |
| | FQCRICMRNFSRSDSLSAHIRTHTGEKPF | VDEMTKKFGTLTIHDTEK (SEQ ID NO: 232) |
| | ACDICGRKFAQKATRITHTKIHLRGSGG | Linker |
| | GGSGGSGGSGSYALGPYQISAPQLPAYN | AA |
| | GQTVGTFYYVNDAGGLESKVFSSGGPT | ZF (R13-1) |
| | PYPNYANAGHVEGQSALFMRDNGISEG | MAERPFQCRICMRNFSRSDNLSTHIRTHTGEKP |
| | LVFHNNPEGTCGFCVNMTETLLPENAK | FACDICGRKFADRSDLSRHTKIHTGEKPFQCRIC |
| | MTVVPPEGSGGSTNLSDIIEKETGKQLVI | MRKFAQSGDLTRHTKIHTGSQKPFQCRICMRNF |
| | QESILMLPEEVEEVIGNKPESDILVHTAY | SRSDSLSAHIRTHTGEKPFACDICGRKFAQKAT |
| | DESTDENVMLLTSDAPEYKPWALVIQD | RITHTKIHLR (SEQ ID NO: 403) |
| | SNGENKIKML (SEQ ID NO: 183) | Linker |
| | | GSGGGGSGGSGGS (SEQ ID NO: 222) |
| | | Split DddA (DddA-G1397N) |
| | | GSYALGPYQISAPQLPAYNGQTVGTFYYVNDA |
| | | GGLESKVFSSGGPTPYPNYANAGHVEGQSALF |
| | | MRDNGISEGLVFHNNPEGTCGFCVNMTETLLP |
| | | ENAKMTVVPPEG (SEQ ID NO: 340) |
| | | Linker |
| | | SGGS (SEQ ID NO: 221) |
| | | UGI |
| | | TNLSDIIEKETGKQLVIQESILMLPEEVEEVIGNK |
| | | PESDILVHTAYDESTDENVMLLTSDAPEYKPW |
| | | ALVIQDSNGENKIKML (SEQ ID NO: 378) |
| 5xZnF-9- | MLGFVGRVAAAPASGALRRLTPSASLPP | MTS |
| R13 v3 | AQLLLRAAPTAVHPVRDYAAQDYKDD | MLGFVGRVAAAPASGALRRLTPSASLPPAQLLL |
| | DDKVDEMTKKFGTLTIHDTEKAAMAER | RAAPTAVHPVRDYAAQ (SEQ ID NO: 230) |
| | PFQCRICMRNFSQSSSLVRHIRTHTGEKP | FLAG tag |
| | FACDICGRKFARSDNLVRHTKIHTGSQK | DYKDDDDK (SEQ ID NO: 347) |
| | PFQCRICMRNFSQAGHLASHIRTHTGEK | NES |
| | PFACDICGRKFARKDNLKNHTKIHTGEK | VDEMTKKFGTLTIHDTEK (SEQ ID NO: 232) |
| | PFQCRICMRKFARKDALRGHTKIHLRGS | Linker |
| | GGGGSGGSGGSAIPVKRGATGETKVFT | AA |
| | GNSNSPKSPTKGGCSGGSTNLSDIIEKET | ZF (5xZnF-9-R13) |
| | GKQLVIQESILMLPEEVEEVIGNKPESDI | MAERPFQCRICMRNFSQSSSLVRHIRTHTGEKP |
| | LVHTAYDESTDENVMLLTSDAPEYKPW | FACDICGRKFARSDNLVRHTKIHTGSQKPFQCR |
| | ALVIQDSNGENKIKML | ICMRNFSQAGHLASHIRTHTGEKPFACDICGRK |
| | (SEQ ID NO: 184) | FARKDNLKNHTKIHTGEKPFQCRICMRKFARK |
| | | DALRGHTKIHLR (SEQ ID NO: 404) |
| | | Linker |
| | | GSGGGGSGGSGGS (SEQ ID NO: 222) |
| | | Split DddA (DddA-G1397C) |
| | | AIPVKRGATGETKVFTGNSNSPKSPTKGGC |
| | | (SEQ ID NO: 341) |
| | | Linker |
| | | SGGS (SEQ ID NO: 221) |
| | | UGI |
| | | TNLSDIIEKETGKQLVIQESILMLPEEVEEVIGNK |
| | | PESDILVHTAYDESTDENVMLLTSDAPEYKPW |
| | | ALVIQDSNGENKIKML (SEQ ID NO: 378) |
| 5xZnF-12- | MLGFVGRVAAAPASGALRRLTPSASLPP | MTS |
| R13 v3 | AQLLLRAAPTAVHPVRDYAAQDYKDD | MLGFVGRVAAAPASGALRRLTPSASLPPAQLLL |
| | DDKVDEMTKKFGTLTIHDTEKAAMAER | RAAPTAVHPVRDYAAQ (SEQ ID NO: 230) |
| | PFQCRICMRNFSRSDHLTTHIRTHTGEKP | FLAG tag |
| | FACDICGRKFAQSSSLVRHTKIHTGSQKP | DYKDDDDK (SEQ ID NO: 347) |
| | FQCRICMRNFSRSDNLVRHIRTHTGEKP | NES |
| | FACDICGRKFAQAGHLASHTKIHTGEKP | VDEMTKKFGTLTIHDTEK (SEQ ID NO: 232) |
| | FQCRICMRKFARKDNLKNHTKIHLRGSG | Linker |
| | GGGSGGSGGSAIPVKRGATGETKVFTG | AA |
| | NSNSPKSPTKGGCSGGSTNLSDIIEKETG | ZF (5xZnF-12-R13) |
| | KQLVIQESILMLPEEVEEVIGNKPESDIL | MAERPFQCRICMRNFSRSDHLTTHIRTHTGEKP |
| | VHTAYDESTDENVMLLTSDAPEYKPWA | FACDICGRKFAQSSSLVRHTKIHTGSQKPFQCRI |
| | LVIQDSNGENKIKML | CMRNFSRSDNLVRHIRTHTGEKPFACDICGRKF |
| | (SEQ ID NO: 185) | AQAGHLASHTKIHTGEKPFQCRICMRKFARKD |
| | | NLKNHTKIHLR (SEQ ID NO: 405) |
| | | Linker |
| | | GSGGGGSGGSGGS (SEQ ID NO: 222) |
| | | Split DddA (DddA-G1397C) |
| | | AIPVKRGATGETKVFTGNSNSPKSPTKGGC |
| | | (SEQ ID NO: 341) |
| | | Linker |
| | | SGGS (SEQ ID NO: 221) |
| | | UGI |
| | | TNLSDIIEKETGKQLVIQESILMLPEEVEEVIGNK |
| | | PESDILVHTAYDESTDENVMLLTSDAPEYKPW |
| | | ALVIQDSNGENKIKML (SEQ ID NO: 378) |

### IV. Linkers

[0440] In certain embodiments, linkers may be used to link any of the peptides or peptide domains or moieties of the invention (e.g., a mitoTALE fused to an evolved DddA).

[0441] As defined above, the term “linker,” as used herein, refers to a chemical group or a molecule linking two molecules or moieties (e.g., a binding domain (e.g., mitoTALE) and a editing domain (e.g., DddA, or portion thereof)). In some embodiments, a linker joins a binding domain (e.g., mitoTALE) and a catalytic domain (e.g., DddA, or portion thereof). In some embodiments, a linker joins a mitoTALE and DddA. Typically, the linker is positioned between, or flanked by, two groups, molecules, or other moieties and connected to each one via a covalent bond, thus connecting the two. In some embodiments, the linker is an amino acid or a plurality of amino acids (e.g., a peptide or protein). In some embodiments, the linker is an organic molecule, group, polymer, or chemical moiety. In some embodiments, the linker is 1-100 amino acids in length, for example, 1, 2, 3, 4, 5, 6, 7, 8, 9, 10, 11, 12, 13, 14, 15, 16, 17, 18, 19, 20, 21, 22, 23, 24, 25, 26, 27, 28, 29, 30, 30-35, 35-40, 40-45, 45-50, 50-60, 60-70, 70-80, 80-90, 90-100, 100-150, or 150-200 amino acids in length. Longer linkers are also contemplated.

[0442] The linker may be as simple as a covalent bond, or it may be a polymeric linker many atoms in length. In certain embodiments, the linker is a polypeptide or based on amino acids. In other embodiments, the linker is not peptide-like. In certain embodiments, the linker is a covalent bond (e.g., a carbon-carbon bond, disulfide bond, carbon-heteroatom bond, etc.). In certain embodiments, the linker is a carbon-nitrogen bond of an amide linkage. In certain embodiments, the linker is a cyclic or acyclic, substituted or unsubstituted, branched or unbranched aliphatic or heteroaliphatic linker. In certain embodiments, the linker is polymeric (e.g., polyethylene, polyethylene glycol, polyamide, polyester, etc.). In certain embodiments, the linker comprises a monomer, dimer, or polymer of aminoalkanoic acid. In certain embodiments, the linker comprises an aminoalkanoic acid (e.g., glycine, ethanoic acid, alanine, beta-alanine, 3-aminopropanoic acid, 4-aminobutanoic acid, 5-pentanoic acid, etc.). In certain embodiments, the linker comprises a monomer, dimer, or polymer of aminohexanoic acid (Ahx). In certain embodiments, the linker is based on a carbocyclic moiety (e.g., cyclopentane, cyclohexane). In other embodiments, the linker comprises a polyethylene glycol moiety (PEG). In other embodiments, the linker comprises amino acids. In certain embodiments, the linker comprises a peptide. In certain embodiments, the linker comprises an aryl or heteroaryl moiety. In certain embodiments, the linker is based on a phenyl ring. The linker may included functionalized moieties to facilitate attachment of a nucleophile (e.g., thiol, amino) from the peptide to the linker. Any electrophile may be used as part of the linker. Exemplary electrophiles include, but are not limited to, activated esters, activated amides, Michael acceptors, alkyl halides, aryl halides, acyl halides, and isothiocyanates.

[0443] In some other embodiments, the linker comprises the amino acid sequence is greater than one amino acid residues in length. In some embodiments, the linker comprises less than six amino acid in length. In some embodiments, the linker is two amino acid residues in length. In some embodiments, the linker comprises the amino acid sequence of any one of SEQ ID NOs.: 202-221.

[0444] In certain embodiments, linkers may be used to link any of the protein or protein domains described herein (e.g., a deaminase domain and a Cas9 domain). The linker may be as simple as a covalent bond, or it may be a polymeric linker many atoms in length. In certain embodiments, the linker is a polypeptide or based on amino acids. In other embodiments, the linker is not peptide-like. In certain embodiments, the linker is a covalent bond (e.g., a carbon-carbon bond, disulfide bond, carbon-heteroatom bond, etc.). In certain embodiments, the linker is a carbon-nitrogen bond of an amide linkage. In certain embodiments, the linker is a cyclic or acyclic, substituted or unsubstituted, branched or unbranched aliphatic or heteroaliphatic linker. In certain embodiments, the linker is polymeric (e.g., polyethylene, polyethylene glycol, polyamide, polyester, etc.). In certain embodiments, the linker comprises a monomer, dimer, or polymer of aminoalkanoic acid. In certain embodiments, the linker comprises an aminoalkanoic acid (e.g., glycine, ethanoic acid, alanine, beta-alanine, 3-aminopropanoic acid, 4-aminobutanoic acid, 5-pentanoic acid, etc.). In certain embodiments, the linker comprises a monomer, dimer, or polymer of aminohexanoic acid (Ahx). In certain embodiments, the linker is based on a carbocyclic moiety (e.g., cyclopentane, cyclohexane). In other embodiments, the linker comprises a polyethylene glycol moiety (PEG). In other embodiments, the linker comprises amino acids. In certain embodiments, the linker comprises a peptide. In certain embodiments, the linker comprises an aryl or heteroaryl moiety. In certain embodiments, the linker is based on a phenyl ring. The linker may include functionalized moieties to facilitate attachment of a nucleophile (e.g., thiol, amino) from the peptide to the linker. Any electrophile may be used as part of the linker. Exemplary electrophiles include, but are not limited to, activated esters, activated amides, Michael acceptors, alkyl halides, aryl halides, acyl halides, and isothiocyanates.

[0445] In some embodiments, the linker is an amino acid or a plurality of amino acids (e.g., a peptide or protein). In some embodiments, the linker is a bond e.g., a covalent bond), an organic molecule, group, polymer, or chemical moiety. In some embodiments, the linker is 5-100 amino acids in length, for example, 5, 6, 7, 8, 9, 10, 11, 12, 13, 14, 15, 16, 17, 18, 19, 20, 21, 22, 23, 24, 25, 26, 27, 28, 29, 30, 31, 32, 33, 34, 35-40, 40-45, 45-50, 50-60, 60-70, 70-80, 80-90, 90-100, 100-110, 110-120, 120-130, 130-140, 140-150, or 150-200 amino acids in length. Longer or shorter linkers are also contemplated. In some embodiments, a linker comprises the amino acid sequence SGSETPGTSESATPES (SEQ ID NO: 202), which may also be referred to as the XTEN linker. In some embodiments, the linker is 32 amino acids in length. In some embodiments, the linker comprises the amino acid sequence (SGGS)₂-SGSETPGTSESATPES-(SGGS)₂ (SEQ ID NO: 203), which may also be referred to as (SGGS)₂-XTEN-(SGGS)₂ (SEQ ID NO: 203). In some embodiments, the linker comprises the amino acid sequence, wherein n is 0, 1, 2, 3, 4, 5, 6, 7, 8, 9, or 10. In some embodiments, a linker comprises the amino acid sequence SGGS (SEQ ID NO: 204). In some embodiments, a linker comprises (SGGS)ₙ (SEQ ID NO: 204), (GGGS)ₙ (SEQ ID NO: 205), (GGGGS)ₙ (SEQ ID NO: 206), (G)ₙ (SEQ ID NO: 207), (EAAAK)ₙ (SEQ ID NO: 208), (SGGS)ₙ-SGSETPGTSESATPES-(SGGS)ₙ (SEQ ID NO: 209), (GGS)ₙ (SEQ ID NO: 210), SGSETPGTSESATPES (SEQ ID NO: 202), or (XP)ₙ (SEQ ID NO: 211) motif, or a combination of any of these, wherein n is independently an integer between 1 and 30, and wherein X is any amino acid. In some embodiments, n is 1, 2, 3, 4, 5, 6, 7, 8, 9, 10, 11, 12, 13, 14, or 15. In some embodiments, a linker comprises SGSETPGTSESATPES (SEQ ID NO: 202), and SGGS (SEQ ID NO: 204). In some embodiments, a linker comprises SGGSSGSETPGTSESATPESSGGS (SEQ ID NO: 212). In some embodiments, a linker comprises SGGSSGGSSGSETPGTSESATPESSGGSSGGS (SEQ ID NO: 203). In some embodiments, a linker comprises GGSGGSPGSPAGSPTSTEEGTSESATPESGPGTSTEPSEGSAPGSPAGSPTSTEEGTSTEPSEGS APGTSTEPSEGSAPGTSESATPESGPGSEPATSGGSGGS (SEQ ID NO: 213). In some embodiments, the linker is 24 amino acids in length. In some embodiments, the linker comprises the amino acid sequence SGGSSGGSSGSETPGTSESATPES (SEQ ID NO: 214). In some embodiments, the linker is 40 amino acids in length. In some embodiments, the linker comprises the amino acid sequence SGGSSGGSSGSETPGTSESATPESSGGSSGGSSGGSSGGS (SEQ ID NO: 215). In some embodiments, the linker is 64 amino acids in length. In some embodiments, the linker comprises the amino acid sequence SGGSSGGSSGSETPGTSESATPESSGGSSGGSSGGSSGGSSGSETPGTSESATPESSGGSSGGS (SEQ ID NO: 216). In some embodiments, the linker is 92 amino acids in length. In some embodiments, the linker comprises the amino acid sequence PGSPAGSPTSTEEGTSESATPESGPGTSTEPSEGSAPGSPAGSPTSTEEGTSTEPSEGSAPGTST EPSEGSAPGTSESATPESGPGSEPATS (SEQ ID NO: 217). It should be appreciated that any of the linkers provided herein may be used to link a first adenosine deaminase and a second adenosine deaminase; an adenosine deaminase (e.g., a first or a second adenosine deaminase) and a napDNAbp; a napDNAbp and an NLS; or an adenosine deaminase (e.g., a first or a second adenosine deaminase) and an NLS.

[0446] In some embodiments, any of the fusion proteins provided herein, comprise an adenosine or a cytidine deaminase and a napDNAbp that are fused to each other via a linker. In some embodiments, any of the fusion proteins provided herein, comprise a first adenosine deaminase and a second adenosine deaminase that are fused to each other via a linker. In some embodiments, any of the fusion proteins provided herein, comprise an NLS, which may be fused to an adenosine deaminase (e.g., a first and/or a second adenosine deaminase), a nucleic acid programmable DNA binding protein (napDNAbp). Various linker lengths and flexibilities between an adenosine deaminase (e.g., an engineered ecTadA) and a napDNAbp (e.g., a Cas9 domain), and/or between a first adenosine deaminase and a second adenosine deaminase can be employed (e.g., ranging from very flexible linkers of the form (GGGGS)ₙ (SEQ ID NO: 206) and (G)ₙ (SEQ ID NO: 207) to more rigid linkers of the form (EAAAK)ₙ (SEQ ID NO: 208), (SGGS)ₙ (SEQ ID NO: 204), SGSETPGTSESATPES (SEQ ID NO: 202) (see, e.g., Guilinger J P, Thompson D B, Liu D R. Fusion of catalytically inactive Cas9 to FokI nuclease improves the specificity of genome modification. Nat. Biotechnol. 2014; 32(6): 577-82; the entire contents are incorporated herein by reference) and (XP)ₙ (SEQ ID NO: 211)) in order to achieve the optimal length for deaminase activity for the specific application. In some embodiments, n is 1, 2, 3, 4, 5, 6, 7, 8, 9, 10, 11, 12, 13, 14, or 15. In some embodiments, the linker comprises a (GGS)ₙ (SEQ ID NO: 210) motif, wherein n is 1, 3, or 7. In some embodiments, the adenosine deaminase and the napDNAbp, and/or the first adenosine deaminase and the second adenosine deaminase of any of the fusion proteins provided herein are fused via a linker comprising the amino acid sequence SGSETPGTSESATPES (SEQ ID NO: 1202), SGGS (SEQ ID NO: 104), SGGSSGSETPGTSESATPESSGGS (SEQ ID NO: 212), SGGSSGGSSGSETPGTSESATPESSGGSSGGS (SEQ ID NO: 203), or GGSGGSPGSPAGSPTSTEEGTSESATPESGPGTSTEPSEGSAPGSPAGSPTSTEEGTSTEPSEGS APGTSTEPSEGSAPGTSESATPESGPGSEPATSGGSGGS (SEQ ID NO: 213). In some embodiments, the linker is 24 amino acids in length. In some embodiments, the linker comprises the amino acid sequence SGGSSGGSSGSETPGTSESATPES (SEQ ID NO: 214). In some embodiments, the linker is 32 amino acids in length. In some embodiments, the linker is 32 amino acids in length. In some embodiments, the linker comprises the amino acid sequence (SGGS)₂-SGSETPGTSESATPES-(SGGS)₂ (SEQ ID NO: 203), which may also be referred to as (SGGS)₂-XTEN-(SGGS)₂ (SEQ ID NO: 203). In some embodiments, the linker comprises the amino acid sequence, wherein n is 0, 1, 2, 3, 4, 5, 6, 7, 8, 9, or 10. In some embodiments, the linker is 40 amino acids in length. In some embodiments, the linker comprises the amino acid sequence SGGSSGGSSGSETPGTSESATPESSGGSSGGSSGGSSGGS (SEQ ID NO: 215). In some embodiments, the linker is 64 amino acids in length. In some embodiments, the linker comprises the amino acid sequence SGGSSGGSSGSETPGTSESATPESSGGSSGGSSGGSSGGSSGSETPGTSESATPESSGGSSGGS (SEQ ID NO: 216). In some embodiments, the linker is 92 amino acids in length. In some embodiments, the linker comprises the amino acid sequence PGSPAGSPTSTEEGTSESATPESGPGTSTEPSEGSAPGSPAGSPTSTEEGTSTEPSEGSAPGTST EPSEGSAPGTSESATPESGPGSEPATS (SEQ ID NO: 217).

### V. Other Fusion Protein Domains

[0447] In various embodiments, the Evolved DddA-containing base editors or the polypeptides that comprise the Evolved DddA-containing base editors (e.g., the pDNAbps and DddA) may include one or more other functional domains, including uracil glycosylase inhibitors (UGI), NLS domains, and mitochondrial localization domains.

### Uracil Glycosylase Inhibitor (UGI)

[0448] In some embodiments, the fusion proteins of the disclosure comprise one or more UGI domains. When the DddA enzyme is employed and deaminates the target nucleotide, it may trigger uracil repair activity in the cell, thereby causing excision of the deaminated nucleotide. This may cause degradation of the nucleic acid or otherwise inhibit the effect of the correction or nucleotide alteration induced by the fusion protein. To inhibit this activity, a UGI may be desired. In some embodiments, the first and/or second fusion protein comprises more than one UGI. In some embodiments, the first and/or second fusion protein comprises two UGIs. In some embodiments, the first and/or second fusion protein contains two UGIs. The UGI or multiple UGIs may be appended or attached to any portion of the fusion protein. In some embodiments, the UGI is attached to the first or second portion of a DddA in the first or second fusion protein. In some embodiments, a second UGI is attached to the first UGI which is attached to the first or second portion of a DddA in the first or second fusion protein.

[0449] In other embodiments, the base editors described herein may comprise one or more uracil glycosylase inhibitors. The term “uracil glycosylase inhibitor” or “UGI,” as used herein, refers to a protein that is capable of inhibiting a uracil-DNA glycosylase base-excision repair enzyme. In some embodiments, a UGI domain comprises a wild-type UGI or a UGI as set forth in SEQ ID NO: 377.

[0450] In some embodiments, the UGI proteins provided herein include fragments of UGI and proteins homologous to a UGI or a UGI fragment. For example, in some embodiments, a UGI domain comprises a fragment of the amino acid sequence set forth in SEQ ID NO: 377. In some embodiments, a UGI fragment comprises an amino acid sequence that comprises at least 60%, at least 65%, at least 70%, at least 75%, at least 80%, at least 85%, at least 90%, at least 95%, at least 96%, at least 97%, at least 98%, at least 99%, or at least 99.5% of the amino acid sequence as set forth in SEQ ID NO: 377. In some embodiments, a UGI comprises an amino acid sequence homologous to the amino acid sequence set forth in SEQ ID NO: 377, or an amino acid sequence homologous to a fragment of the amino acid sequence set forth in SEQ ID NO: 377. In some embodiments, proteins comprising UGI or fragments of UGI or homologs of UGI or UGI fragments are referred to as “UGI variants.” A UGI variant shares homology to UGI, or a fragment thereof. For example a UGI variant is at least 70% identical, at least 75% identical, at least 80% identical, at least 85% identical, at least 90% identical, at least 95% identical, at least 96% identical, at least 97% identical, at least 98% identical, at least 99% identical, at least 99.5% identical, or at least 99.9% identical to a wild type UGI or a UGI as set forth in SEQ ID NO: 377. In some embodiments, the UGI variant comprises a fragment of UGI, such that the fragment is at least 70% identical, at least 80% identical, at least 90% identical, at least 95% identical, at least 96% identical, at least 97% identical, at least 98% identical, at least 99% identical, at least 99.5% identical, or at least 99.9% to the corresponding fragment of wild-type UGI or a UGI as set forth in SEQ ID NO: 377. In some embodiments, the UGI comprises the following amino acid sequence:

Uracil-DNA glycosylase inhibitor
(>sp|P14739|UNGI_BPPB2)
(SEQ ID NO: 377)
MTNLSDIIEKETGKQLVIQESILMLPEEVEEVIGNKPESDILVHTAYDES
TDENVMLLTSDAPEYKPWALVIQDSNGENKIKML.

[0451] The base editors described herein may comprise more than one UGI domain, which may be separated by one or more linkers as described herein. It will also be understood that in the context of the herein disclosed base editors, the UGI domain may be linked to a deaminase domain.

[0452] In some embodiments, a UGI is absent from a base editor. In some embodiments, where a base editor comprises a ZFP or mitoZFP, UGIs are removed or are absent from the base editor. In some embodiments, the removal and/or absence of UGIs increases the activity of a DddA.

### NLS Domains

[0453] In various embodiments, the fusion proteins may comprise one or more nuclear localization sequences (NLS), which help promote translocation of a protein into the cell nucleus. Such sequences are well-known in the art and can include the following examples:

| | | SEQ |
|---|---|---|
| | | ID |
| Description | Sequence | NO: |
| NLS of SV40 | PKKKRKV | 412 |
| large T-Ag | | |
| NLS of | VSRKRPRP | 413 |
| polyoma | | |
| large T-Ag | | |
| NLS of c-MYC | PAAKRVKLD | 414 |
| NLS of TUS- | KLKIKRPVK | 415 |
| protein | | |
| NLS of | EGAPPAKRAR | 416 |
| Hepatitis | | |
| D virus | | |
| antigen | | |
| NLS of murine | PPQPKKKPLDGE | 417 |
| p53 | | |
| NLS | MKRTADGSEFESPKKKRKV | 418 |
| NLS of | AVKRPAATKKAGQAKKKKLD | 419 |
| nucleoplasmin | | |
| NLS of PE1 | SGGSKRTADGSEFEPKKKRKV | 420 |
| and PE2 | | |
| NLS of EGL-13 | MSRRRKANPTKLSENAKKLAKEVEN | 421 |
| NLS | MDSLLMNRRKFLYQFKNVRWAKGRRETYLC | 422 |

[0454] The NLS examples above are non-limiting. The PE fusion proteins may comprise any known NLS sequence, including any of those described in Cokol et al., “Finding nuclear localization signals,” EMBO Rep., 2000, 1(5): 411-415 and Freitas et al., “Mechanisms and Signals for the Nuclear Import of Proteins,” Current Genomics, 2009, 10(8): 550-7, each of which are incorporated herein by reference.

### Mitochondrial Targeting Sequence (MTS)

[0455] In various embodiments, the Evolved DddA-containing base editors or the polypeptides that comprise the Evolved DddA-containing base editors (e.g., the pDNAbps and DddA) may be engineered to include one or more mitochondrial targeting sequences (MTS) (or mitochondrial localization sequence (MLS)) which facilitate that translocation of a polypeptide into the mitochondria. MTS are known in the art and exemplary sequences are provided herein. In general MTSs are short peptide sequences (about 3-70 amino acids long) that direct a newly synthesized protein to the mitochondria within a cell. It is usually found at the N-terminus and consists of an alternating pattern of hydrophobic and positively charged amino acids to form what is called an amphipathic helix. Mitochondrial localization sequences can contain additional signals that subsequently target the protein to different regions of the mitochondria, such as the mitochondrial matrix. One exemplary mitochondrial localization sequence is the mitochondrial localization sequence derived from Cox8, a mitochondrial cytochrome c oxidase subunit VIII. In embodiments, a mitochondrial localization sequence derived from Cox8 includes the amino acid sequence: MSVLTPLLLRGLTGSARRLPVPRAKIHSL (SEQ ID NO: 14). In the embodiments, the mitochondrial localization sequence derived from Cox8 includes an amino acid sequence that is about 50%, 55%, 60%, 65%, 70%, 75%, 80%, 85%, 90% or 95% identity to SEQ ID NO: 14.

### VI. Delivery

[0456] In another aspect, the present disclosure provides for the delivery of fusion proteins in vitro and in vivo using split DddA protein formulations. The presently disclosed methods for delivering fusion proteins via various methods. For example, DddA proteins have exhibited toxic effects in vivo, and so require special solutions. One such solution is formulating the DddA, and fusion protein thereof, split into pairs that are packaged into two separate rAAV particles that, when co-delivered to a cell, reconstitute the functional DddA protein. Several other special considerations to account for the unique features of fusion protein are described, including the optimization of split sites. MitoTALE-DddA and/or mitoZF-DddA and/or Cas9-DddA fusion proteins, mRNA expressing the fusion proteins, or DNA can be packaged into lipid nanoparticles, rAAV, or lentivirus and injected, ingested, or inhaled to alter genomic DNA in vivo and ex vivo, including for the purposes of establishing animal models of human disease, testing therapeutic and scientific hypotheses in animal models of human disease, and treating disease in humans.

[0457] In another aspect, the present disclosure provides for the delivery of base editors in vitro and in vivo using various strategies, including on separate vectors using split inteins and as well as direct delivery strategies of the ribonucleoprotein complex (i.e., the base editor complexed to the gRNA and/or the second-site gRNA) using techniques such as electroporation, use of cationic lipid-mediated formulations, and induced endocytosis methods using receptor ligands fused to the ribonucleoprotein complexes. Any such methods are contemplated herein.

[0458] In some aspects, the invention provides methods comprising delivering one or more base editor-encoding polynucleotides, such as or one or more vectors as described herein encoding one or more components of the base editing system described herein, one or more transcripts thereof, and/or one or proteins transcribed therefrom, to a host cell. In some aspects, the invention further provides cells produced by such methods, and organisms (such as animals, plants, or fungi) comprising or produced from such cells. In some embodiments, a base editor as described herein in combination with (and optionally complexed with) a guide sequence is delivered to a cell. Conventional viral and non-viral based gene transfer methods can be used to introduce nucleic acids in mammalian cells or target tissues. Such methods can be used to administer nucleic acids encoding components of a base editor to cells in culture, or in a host organism. Non-viral vector delivery systems include DNA plasmids, RNA (e.g. a transcript of a vector described herein), naked nucleic acid, and nucleic acid complexed with a delivery vehicle, such as a liposome. Viral vector delivery systems include DNA and RNA viruses, which have either episomal or integrated genomes after delivery to the cell. For a review of gene therapy procedures, see Anderson, Science 256:808-813 (1992); Nabel & Felgner, TIBTECH 11:211-217 (1993); Mitani & Caskey, TIBTECH 11:162-166 (1993); Dillon, TIBTECH 11:167-175 (1993); Miller, Nature 357:455-460 (1992); Van Brunt, Biotechnology 6(10):1149-1154 (1988); Vigne, Restorative Neurology and Neuroscience 8:35-36 (1995); Kremer & Perricaudet, British Medical Bulletin 51(1):31-44 (1995); Haddada et al., in Current Topics in Microbiology and Immunology Doerfler and Bihm (eds) (1995); and Yu et al., Gene Therapy 1:13-26 (1994).

[0459] Methods of non-viral delivery of nucleic acids include lipofection, nucleofection, microinjection, biolistics, virosomes, liposomes, immunoliposomes, polycation or lipid:nucleic acid conjugates, naked DNA, artificial virions, and agent-enhanced uptake of DNA. Lipofection is described in e.g., U.S. Pat. Nos. 5,049,386, 4,946,787; and 4,897,355) and lipofection reagents are sold commercially (e.g., Transfectam™ and Lipofectin™). Cationic and neutral lipids that are suitable for efficient receptor-recognition lipofection of polynucleotides include those of Feigner, WO 91/17424; WO 91/16024. Delivery can be to cells (e.g. in vitro or ex vivo administration) or target tissues (e.g. in vivo administration).

[0460] The preparation of lipid:nucleic acid complexes, including targeted liposomes such as immunolipid complexes, is well known to one of skill in the art (see, e.g., Crystal, Science 270:404-410 (1995); Blaese et al., Cancer Gene Ther. 2:291-297 (1995); Behr et al., Bioconjugate Chem. 5:382-389 (1994); Remy et al., Bioconjugate Chem. 5:647-654 (1994); Gao et al., Gene Therapy 2:710-722 (1995); Ahmad et al., Cancer Res. 52:4817-4820 (1992); U.S. Pat. Nos. 4,186,183, 4,217,344, 4,235,871, 4,261,975, 4,485,054, 4,501,728, 4,774,085, 4,837,028, and 4,946,787).

[0461] The use of RNA or DNA viral based systems for the delivery of nucleic acids take advantage of highly evolved processes for targeting a virus to specific cells in the body and trafficking the viral payload to the nucleus. Viral vectors can be administered directly to patients (in vivo) or they can be used to treat cells in vitro, and the modified cells may optionally be administered to patients (ex vivo). Conventional viral based systems could include retroviral, lentivirus, adenoviral, adeno-associated and herpes simplex virus vectors for gene transfer. Integration in the host genome is possible with the retrovirus, lentivirus, and adeno-associated virus gene transfer methods, often resulting in long term expression of the inserted transgene. Additionally, high transduction efficiencies have been observed in many different cell types and target tissues.

[0462] The tropism of a viruses can be altered by incorporating foreign envelope proteins, expanding the potential target population of target cells. Lentiviral vectors are retroviral vectors that are able to transduce or infect non-dividing cells and typically produce high viral titers. Selection of a retroviral gene transfer system would therefore depend on the target tissue. Retroviral vectors are comprised of cis-acting long terminal repeats with packaging capacity for up to 6-10 kb of foreign sequence. The minimum cis-acting LTRs are sufficient for replication and packaging of the vectors, which are then used to integrate the therapeutic gene into the target cell to provide permanent transgene expression. Widely used retroviral vectors include those based upon murine leukemia virus (MuLV), gibbon ape leukemia virus (GaLV), Simian Immuno deficiency virus (SIV), human immuno deficiency virus (HIV), and combinations thereof (see, e.g., Buchscher et al., J. Virol. 66:2731-2739 (1992); Johann et al., J. Virol. 66:1635-1640 (1992); Sommnerfelt et al., Virol. 176:58-59 (1990); Wilson et al., J. Virol. 63:2374-2378 (1989); Miller et al., J. Virol. 65:2220-2224 (1991); PCT/US94/05700). In applications where transient expression is preferred, adenoviral based systems may be used. Adenoviral based vectors are capable of very high transduction efficiency in many cell types and do not require cell division. With such vectors, high titer and levels of expression have been obtained. This vector can be produced in large quantities in a relatively simple system. Adeno-associated virus (“AAV”) vectors may also be used to transduce cells with target nucleic acids, e.g., in the in vitro production of nucleic acids and peptides, and for in vivo and ex vivo gene therapy procedures (see, e.g., West et al., Virology 160:38-47 (1987); U.S. Pat. No. 4,797,368; WO 93/24641; Kotin, Human Gene Therapy 5:793-801 (1994); Muzyczka, J. Clin. Invest. 94:1351 (1994). Construction of recombinant AAV vectors are described in a number of publications, including U.S. Pat. No. 5,173,414; Tratschin et al., Mol. Cell. Biol. 5:3251-3260 (1985); Tratschin, et al., Mol. Cell. Biol. 4:2072-2081 (1984); Hermonat & Muzyczka, PNAS 81:6466-6470 (1984); and Samulski et al., J. Virol. 63:03822-3828 (1989).

[0463] Packaging cells are typically used to form virus particles that are capable of infecting a host cell. Such cells include 293 cells, which package adenovirus, and ψ2 cells or PA317 cells, which package retrovirus. Viral vectors used in gene therapy are usually generated by producing a cell line that packages a nucleic acid vector into a viral particle. The vectors typically contain the minimal viral sequences required for packaging and subsequent integration into a host, other viral sequences being replaced by an expression cassette for the polynucleotide(s) to be expressed. The missing viral functions are typically supplied in trans by the packaging cell line. For example, AAV vectors used in gene therapy typically only possess ITR sequences from the AAV genome which are required for packaging and integration into the host genome. Viral DNA is packaged in a cell line, which contains a helper plasmid encoding the other AAV genes, namely rep and cap, but lacking ITR sequences. The cell line may also be infected with adenovirus as a helper. The helper virus promotes replication of the AAV vector and expression of AAV genes from the helper plasmid. The helper plasmid is not packaged in significant amounts due to a lack of ITR sequences. Contamination with adenovirus can be reduced by, e.g., heat treatment to which adenovirus is more sensitive than AAV. Additional methods for the delivery of nucleic acids to cells are known to those skilled in the art. See, for example, US20030087817, incorporated herein by reference.

[0464] In various embodiments, the base editor constructs (including, the split-constructs) may be engineered for delivery in one or more rAAV vectors. An rAAV as related to any of the methods and compositions provided herein may be of any serotype including any derivative or pseudotype (e.g., 1, 2, 3, 4, 5, 6, 7, 8, 9, 10, 11, 12, 13, 2/1, 2/5, 2/8, 2/9, 3/1, 3/5, 3/8, or 3/9). An rAAV may comprise a genetic load (i.e., a recombinant nucleic acid vector that expresses a gene of interest, such as a whole or split base editor fusion protein that is carried by the rAAV into a cell) that is to be delivered to a cell. An rAAV may be chimeric.

[0465] As used herein, the serotype of an rAAV refers to the serotype of the capsid proteins of the recombinant virus. Non-limiting examples of derivatives and pseudotypes include rAAV2/1, rAAV2/5, rAAV2/8, rAAV2/9, AAV2-AAV3 hybrid, AAVrh.10, AAVhu.14, AAV3a/3b, AAVrh32.33, AAV-HSC15, AAV-HSC17, AAVhu.37, AAVrh.8, CHt-P6, AAV2.5, AAV6.2, AAV2i8, AAV-HSC15/17, AAVM41, AAV9.45, AAV6(Y445F/Y731F), AAV2.5T, AAV-HAE1/2, AAV clone 32/83, AAVShH10, AAV2 (Y->F), AAV8 (Y733F), AAV2.15, AAV2.4, AAVM41, and AAVr3.45. A non-limiting example of derivatives and pseudotypes that have chimeric VP1 proteins is rAAV2/5-1VP1u, which has the genome of AAV2, capsid backbone of AAV5 and VP1u of AAV1. Other non-limiting example of derivatives and pseudotypes that have chimeric VP1 proteins are rAAV2/5-8VP1u, rAAV2/9-1VP1u, and rAAV2/9-8VP1u.

[0466] AAV derivatives/pseudotypes, and methods of producing such derivatives/pseudotypes are known in the art (see, e.g., Mol Ther. 2012 April; 20(4):699-708. doi: 10.1038/mt.2011.287. Epub 2012 Jan. 24. The AAV vector toolkit: poised at the clinical crossroads. Asokan A1, Schaffer D V , Samulski R J.). Methods for producing and using pseudotyped rAAV vectors are known in the art (see, e.g., Duan et al., J. Virol., 75:7662-7671, 2001; Halbert et al., J. Virol., 74:1524-1532, 2000; Zolotukhin et al., Methods, 28:158-167, 2002; and Auricchio et al., Hum. Molec. Genet., 10:3075-3081, 2001).

[0467] Methods of making or packaging rAAV particles are known in the art and reagents are commercially available (see, e.g., Zolotukhin et al. Production and purification of serotype 1, 2, and 5 recombinant adeno-associated viral vectors. Methods 28 (2002) 158-167; and U.S. Patent Publication Numbers US20070015238 and US20120322861, which are incorporated herein by reference; and plasmids and kits available from ATCC and Cell Biolabs, Inc.). For example, a plasmid comprising a gene of interest may be combined with one or more helper plasmids, e.g., that contain a rep gene (e.g., encoding Rep78, Rep68, Rep52 and Rep40) and a cap gene (encoding VP1, VP2, and VP3, including a modified VP2 region as described herein), and transfected into a recombinant cells such that the rAAV particle can be packaged and subsequently purified.

[0468] Recombinant AAV may comprise a nucleic acid vector, which may comprise at a minimum: (a) one or more heterologous nucleic acid regions comprising a sequence encoding a protein or polypeptide of interest or an RNA of interest (e.g., a siRNA or microRNA), and (b) one or more regions comprising inverted terminal repeat (ITR) sequences (e.g., wild-type ITR sequences or engineered ITR sequences) flanking the one or more nucleic acid regions (e.g., heterologous nucleic acid regions). Herein, heterologous nucleic acid regions comprising a sequence encoding a protein of interest or RNA of interest are referred to as genes of interest.

[0469] Any one of the rAAV particles provided herein may have capsid proteins that have amino acids of different serotypes outside of the VP1u region. In some embodiments, the serotype of the backbone of the VP1 protein is different from the serotype of the ITRs and/or the Rep gene. In some embodiments, the serotype of the backbone of the VP1 capsid protein of a particle is the same as the serotype of the ITRs. In some embodiments, the serotype of the backbone of the VP1 capsid protein of a particle is the same as the serotype of the Rep gene. In some embodiments, capsid proteins of rAAV particles comprise amino acid mutations that result in improved transduction efficiency.

[0470] In some embodiments, the nucleic acid vector comprises one or more regions comprising a sequence that facilitates expression of the nucleic acid (e.g., the heterologous nucleic acid), e.g., expression control sequences operatively linked to the nucleic acid. Numerous such sequences are known in the art. Non-limiting examples of expression control sequences include promoters, insulators, silencers, response elements, introns, enhancers, initiation sites, termination signals, and poly(A) tails. Any combination of such control sequences is contemplated herein (e.g., a promoter and an enhancer).

[0471] Final AAV constructs may incorporate a sequence encoding the gRNA. In other embodiments, the AAV constructs may incorporate a sequence encoding the second-site nicking guide RNA. In still other embodiments, the AAV constructs may incorporate a sequence encoding the second-site nicking guide RNA and a sequence encoding the gRNA.

[0472] In various embodiments, the gRNAs and the second-site nicking guide RNAs can be expressed from an appropriate promoter, such as a human U6 (hU6) promoter, a mouse U6 (mU6) promoter, or other appropriate promoter. The gRNAs and the second-site nicking guide RNAs can be driven by the same promoters or different promoters.

[0473] In some embodiments, a rAAV constructs or the herein compositions are administered to a subject enterally. In some embodiments, a rAAV constructs or the herein compositions are administered to the subject parenterally. In some embodiments, a rAAV particle or the herein compositions are administered to a subject subcutaneously, intraocularly, intravitreally, subretinally, intravenously (IV), intracerebro-ventricularly, intramuscularly, intrathecally (IT), intracisternally, intraperitoneally, via inhalation, topically, or by direct injection to one or more cells, tissues, or organs. In some embodiments, a rAAV particle or the herein compositions are administered to the subject by injection into the hepatic artery or portal vein.

[0474] In other aspects, the base editors can be divided at a split site and provided as two halves of a whole/complete base editor. The two halves can be delivered to cells (e.g., as expressed proteins or on separate expression vectors) and once in contact inside the cell, the two halves form the complete base editor through the self-splicing action of the inteins on each base editor half. Split intein sequences can be engineered into each of the halves of the encoded base editor to facilitate their transplicing inside the cell and the concomitant restoration of the complete, functioning base editor.

[0475] These split intein-based methods overcome several barriers to in vivo delivery. For example, the DNA encoding base editors is larger than the rAAV packaging limit, and so requires special solutions. One such solution is formulating the editor fused to split intein pairs that are packaged into two separate rAAV particles that, when co-delivered to a cell, reconstitute the functional editor protein. Several other special considerations to account for the unique features of prime editing are described, including the optimization of second-site nicking targets and properly packaging base editors into virus vectors, including lentiviruses and rAAV.

[0476] In this aspect, the base editors can be divided at a split site and provided as two halves of a whole/complete base editor. The two halves can be delivered to cells (e.g., as expressed proteins or on separate expression vectors) and once in contact inside the cell, the two halves form the complete base editor through the self-splicing action of the inteins on each base editor half. Split intein sequences can be engineered into each of the halves of the encoded base editor to facilitate their transplicing inside the cell and the concomitant restoration of the complete, functioning base editor.

[0477] In various embodiments, the base editors may be engineered as two half proteins (i.e., a BE N-terminal half and a BE C-terminal half) by “splitting” the whole base editor as a “split site.” The “split site” refers to the location of insertion of split intein sequences (i.e., the N intein and the C intein) between two adjacent amino acid residues in the base editor. More specifically, the “split site” refers to the location of dividing the whole base editor into two separate halves, wherein in each halve is fused at the split site to either the N intein or the C intein motifs. The split site can be at any suitable location in the base editor fusion protein, but preferably the split site is located at a position that allows for the formation of two half proteins which are appropriately sized for delivery (e.g., by expression vector) and wherein the inteins, which are fused to each half protein at the split site termini, are available to sufficiently interact with one another when one half protein contacts the other half protein inside the cell.

[0478] In some embodiments, the split site is located in the napDNAbp domain. In other embodiments, the split site is located in the RT domain. In other embodiments, the split site is located in a linker that joins the napDNAbp domain and the RT domain.

[0479] In various embodiments, split site design requires finding sites to split and insert an N- and C-terminal intein that are both structurally permissive for purposes of packaging the two half base editor domains into two different AAV genomes. Additionally, intein residues necessary for trans splicing can be incorporated by mutating residues at the N terminus of the C terminal extein or inserting residues that will leave an intein “scar.”

[0480] In various embodiments, using SpCas9 nickase (SEQ ID NO: 59, 1368 amino acids) as an example, the split can between any two amino acids between 1 and 1368. Preferred splits, however, will be located between the central region of the protein, e.g., from amino acids 50-1250, or from 100-1200, or from 150-1150, or from 200-1100, or from 250-1050, or from 300-1000, or from 350-950, or from 400-900, or from 450-850, or from 500-800, or from 550-750, or from 600-700 of SEQ ID NO: 59. In specific exemplary embodiments, the split site may be between 740/741, or 801/802, or 1010/1011, or 1041/1042. In other embodiments the split site may be between 1/2, 2/3, 3/4, 4/5, 5/6, 6/7, 7/8, 8/9, 9/10, 10/11, 12/13, 14/15, 15/16, 17/18, 19/20 . . . 50/51 . . . 100/101 . . . 200/201 . . . 300/301 . . . 400/401 . . . 500/501 . . . 600/601 . . . 700/701 . . . 800/801 . . . 900/901 . . . 1000/1001 . . . 1100/1101 . . . 1200/1201 . . . 1300/1301 . . . and 1367/1368, including all adjacent pairs of amino acid residues.

[0481] In various embodiments, the split intein sequences can be engineered from the intein sequences represented by SEQ ID NOs: 17-24

[0482] In various embodiments, the split inteins can be used to separately deliver separate portions of a complete Base editor fusion protein to a cell, which upon expression in a cell, become reconstituted as a complete Base editor fusion protein through the trans splicing.

[0483] In some embodiments, the disclosure provides a method of delivering a Base editor fusion protein to a cell, comprising: constructing a first expression vector encoding an N-terminal fragment of the Base editor fusion protein fused to a first split intein sequence; constructing a second expression vector encoding a C-terminal fragment of the Base editor fusion protein fused to a second split intein sequence; delivering the first and second expression vectors to a cell, wherein the N-terminal and C-terminal fragment are reconstituted as the Base editor fusion protein in the cell as a result of trans splicing activity causing self-excision of the first and second split intein sequences.

[0484] In other embodiments, the split site is in the napDNAbp domain.

[0485] In still other embodiments, the split site is in the adenosine deaminase domain.

[0486] In yet other embodiments, the split site is in the linker.

[0487] In other embodiments, the base editors may be delivered by ribonucleoprotein complexes.

[0488] In this aspect, the base editors may be delivered by non-viral delivery strategies involving delivery of a base editor complexed with a gRNA (i.e., a BE ribonucleoprotein complex) by various methods, including electroporation and lipid nanoparticles. Methods of non-viral delivery of nucleic acids include lipofection, nucleofection, microinjection, biolistics, virosomes, liposomes, immunoliposomes, polycation or lipid:nucleic acid conjugates, naked DNA, artificial virions, and agent-enhanced uptake of DNA. Lipofection is described in e.g., U.S. Pat. Nos. 5,049,386, 4,946,787; and 4,897,355) and lipofection reagents are sold commercially (e.g., Transfectam™ and Lipofectin™). Cationic and neutral lipids that are suitable for efficient receptor-recognition lipofection of polynucleotides include those of Feigner, WO 91/17424; WO 91/16024. Delivery can be to cells (e.g. in vitro or ex vivo administration) or target tissues (e.g. in vivo administration).

[0489] The preparation of lipid:nucleic acid complexes, including targeted liposomes such as immunolipid complexes, is well known to one of skill in the art (see, e.g., Crystal, Science 270:404-410 (1995); Blaese et al., Cancer Gene Ther. 2:291-297 (1995); Behr et al., Bioconjugate Chem. 5:382-389 (1994); Remy et al., Bioconjugate Chem. 5:647-654 (1994); Gao et al., Gene Therapy 2:710-722 (1995); Ahmad et al., Cancer Res. 52:4817-4820 (1992); U.S. Pat. Nos. 4,186,183, 4,217,344, 4,235,871, 4,261,975, 4,485,054, 4,501,728, 4,774,085, 4,837,028, and 4,946,787).

[0490] In some aspects, the invention provides methods comprising delivering one or more fusion proteins or polynucleotides encoding such fusion proteins, such as or one or more vectors as described herein encoding one or more components of the mtDNA editing system provided herein (e.g., deamination of mitochondrial DNA by a fusion protein or multiple fusion proteins) described herein, one or more transcripts thereof, and/or one or proteins transcribed therefrom, to a host cell. In some aspects, the invention further provides cells produced by such methods, and organisms (such as animals, plants, or fungi) comprising or produced from such cells. In some embodiments, a base editor (e.g., deaminating enzyme) as described herein in combination with (and optionally complexed with) a guide domain (e.g., mitoTALE) is delivered to a cell. Conventional viral and non-viral based gene transfer methods can be used to introduce nucleic acids in mammalian cells or target tissues. Such methods can be used to administer nucleic acids encoding components of a base editor to cells in culture, or in a host organism. Non-viral vector delivery systems include DNA plasmids, RNA (e.g. a transcript of a vector described herein), naked nucleic acid, and nucleic acid complexed with a delivery vehicle, such as a liposome. Viral vector delivery systems include DNA and RNA viruses, which have either episomal or integrated genomes after delivery to the cell. For a review of gene therapy procedures, see Anderson, Science 256:808-813 (1992); Nabel & Felgner, TIBTECH 11:211-217 (1993); Mitani & Caskey, TIBTECH 11:162-166 (1993); Dillon, TIBTECH 11:167-175 (1993); Miller, Nature 357:455-460 (1992); Van Brunt, Biotechnology 6(10):1149-1154 (1988); Vigne, Restorative Neurology and Neuroscience 8:35-36 (1995); Kremer & Perricaudet, British Medical Bulletin 51(1):31-44 (1995); Haddada et al., in Current Topics in Microbiology and Immunology Doerfler and Bihm (eds) (1995); and Yu et al., Gene Therapy 1:13-26 (1994).

[0491] Methods of non-viral delivery of nucleic acids include lipofection, nucleofection, microinjection, biolistics, virosomes, liposomes, immunoliposomes, polycation or lipid:nucleic acid conjugates, naked DNA, artificial virions, and agent-enhanced uptake of DNA. Lipofection is described in e.g., U.S. Pat. Nos. 5,049,386; 4,946,787; and 4,897,355) and lipofection reagents are sold commercially (e.g., Transfectam™ and Lipofectin™). Cationic and neutral lipids that are suitable for efficient receptor-recognition lipofection of polynucleotides include those of Felgner: WO 91/17424 and WO 91/16024. Delivery can be to cells (e.g., in vitro or ex vivo administration) or target tissues (e.g., in vivo administration).

[0492] The preparation of lipid:nucleic acid complexes, including targeted liposomes such as immunolipid complexes, is well known to one of skill in the art (see, e.g., Crystal, Science 270:404-410 (1995); Blaese et al., Cancer Gene Ther. 2:291-297 (1995); Behr et al., Bioconjugate Chem. 5:382-389 (1994); Remy et al., Bioconjugate Chem. 5:647-654 (1994); Gao et al., Gene Therapy 2:710-722 (1995); Ahmad et al., Cancer Res. 52:4817-4820 (1992); U.S. Pat. Nos. 4,186,183, 4,217,344, 4,235,871, 4,261,975, 4,485,054, 4,501,728, 4,774,085, 4,837,028, and 4,946,787).

[0493] The use of RNA or DNA viral based systems for the delivery of nucleic acids take advantage of highly evolved processes for targeting a virus to specific cells in the body and trafficking the viral payload to the nucleus. Viral vectors can be administered directly to patients (in vivo) or they can be used to treat cells in vitro, and the modified cells may optionally be administered to patients (ex vivo). Conventional viral based systems could include retroviral, lentivirus, adenoviral, adeno-associated, and herpes simplex virus vectors for gene transfer. Integration in the host genome is possible with the retrovirus, lentivirus, and adeno-associated virus gene transfer methods, often resulting in long term expression of the inserted transgene. Additionally, high transduction efficiencies have been observed in many different cell types and target tissues.

[0494] The tropism of a viruses can be altered by incorporating foreign envelope proteins, expanding the potential target population of target cells. Lentiviral vectors are retroviral vectors that are able to transduce or infect non-dividing cells and typically produce high viral titers. Selection of a retroviral gene transfer system would therefore depend on the target tissue. Retroviral vectors are comprised of cis-acting long terminal repeats with packaging capacity for up to 6-10 kb of foreign sequence. The minimum cis-acting LTRs are sufficient for replication and packaging of the vectors, which are then used to integrate the therapeutic gene into the target cell to provide permanent transgene expression. Widely used retroviral vectors include those based upon murine leukemia virus (MuLV), gibbon ape leukemia virus (GaLV), Simian Immuno deficiency virus (SIV), human immuno deficiency virus (HIV), and combinations thereof (see, e.g., Buchscher et al., J. Virol. 66:2731-2739 (1992); Johann et al., J. Virol. 66:1635-1640 (1992); Sommnerfelt et al., Virol. 176:58-59 (1990); Wilson et al., J. Virol. 63:2374-2378 (1989); Miller et al., J. Virol. 65:2220-2224 (1991); PCT/US94/05700). In applications where transient expression is preferred, adenoviral based systems may be used. Adenoviral based vectors are capable of very high transduction efficiency in many cell types and do not require cell division. With such vectors, high titer and levels of expression have been obtained. This vector can be produced in large quantities in a relatively simple system. Adeno-associated virus (“AAV”) vectors may also be used to transduce cells with target nucleic acids, e.g., in the in vitro production of nucleic acids and peptides, and for in vivo and ex vivo gene therapy procedures (see, e.g., West et al., Virology 160:38-47 (1987); U.S. Pat. No. 4,797,368; WO 93/24641; Kotin, Human Gene Therapy 5:793-801 (1994); Muzyczka, J. Clin. Invest. 94:1351 (1994). Construction of recombinant AAV vectors are described in a number of publications, including U.S. Pat. No. 5,173,414; Tratschin et al., Mol. Cell. Biol. 5:3251-3260 (1985); Tratschin, et al., Mol. Cell. Biol. 4:2072-2081 (1984); Hermonat & Muzyczka, PNAS 81:6466-6470 (1984); and Samulski et al., J. Virol. 63:03822-3828 (1989).

[0495] Packaging cells are typically used to form virus particles that are capable of infecting a host cell. Such cells include 293 cells, which package adenovirus, and ψ2 cells or PA317 cells, which package retrovirus. Viral vectors used in gene therapy are usually generated by producing a cell line that packages a nucleic acid vector into a viral particle. The vectors typically contain the minimal viral sequences required for packaging and subsequent integration into a host, other viral sequences being replaced by an expression cassette for the polynucleotide(s) to be expressed. The missing viral functions are typically supplied in trans by the packaging cell line. For example, AAV vectors used in gene therapy typically only possess ITR sequences from the AAV genome which are required for packaging and integration into the host genome. Viral DNA is packaged in a cell line, which contains a helper plasmid encoding the other AAV genes, namely rep and cap, but lacking ITR sequences. The cell line may also be infected with adenovirus as a helper. The helper virus promotes replication of the AAV vector and expression of AAV genes from the helper plasmid. The helper plasmid is not packaged in significant amounts due to a lack of ITR sequences. Contamination with adenovirus can be reduced by, e.g., heat treatment to which adenovirus is more sensitive than AAV. Additional methods for the delivery of nucleic acids to cells are known to those skilled in the art. See, for example, US 2003-0087817, incorporated herein by reference.

VII. gRNAs

[0496] In certain embodiments, the evolved DddA containing base editors may be fused to a napDNAbp, which are targeted by a corresponding guide RNA (gRNA) to a target deamination site.

[0497] Some aspects of the invention relate to guide sequences (“guide RNA” or “gRNA”) that are capable of guiding a napDNAbp or a base editor comprising a napDNAbp to a target site in a DNA molecule. In various embodiments base editors (e.g., base editors provided herein) can be complexed, bound, or otherwise associated with (e.g., via any type of covalent or non-covalent bond) one or more guide sequences, i.e., the sequence which becomes associated or bound to the base editor and directs its localization to a specific target sequence having complementarity to the guide sequence or a portion thereof. The particular design aspects of a guide sequence will depend upon the nucleotide sequence of a genomic target site of interest and the type of napDNA/RNAbp (e.g., type of Cas protein) present in the base editor, among other factors, such as PAM sequence locations, percent G/C content in the target sequence, the degree of microhomology regions, secondary structures, etc.

[0498] In embodiments relating Evolved DddA-containing base editors comprising Cas9/gRNA complexes, the Cas9 and gRNA components will need to be localized to the mitochondria. Cas9 can be modified with one or more MTS as discussed herein. In addition, the guide RNA may be localized to the mitochondria using known localization techniques for mRNA localization to mitochondria.

[0499] In general, a guide sequence is any polynucleotide sequence having sufficient complementarity with a target polynucleotide sequence to hybridize with the target sequence and direct sequence-specific binding of a napDNAbp (e.g., a Cas9, Cas9 homolog, or Cas9 variant) to the target sequence, such as a sequence within an SMN2 gene that comprises a C840T point mutation.

[0500] In some embodiments, the degree of complementarity between a guide sequence and its corresponding target sequence, when optimally aligned using a suitable alignment algorithm, is about or more than about 50%, 60%, 75%, 80%, 85%, 90%, 95%, 97.5%, 99%, or more. Optimal alignment may be determined with the use of any suitable algorithm for aligning sequences, non-limiting example of which include the Smith-Waterman algorithm, the Needleman-Wunsch algorithm, algorithms based on the Burrows-Wheeler Transform (e.g. the Burrows Wheeler Aligner), ClustalW, Clustal X, BLAT, Novoalign (Novocraft Technologies, ELAND (Illumina, San Diego, Calif.), SOAP (available at soap.genomics.org.cn), and Maq (available at maq.sourceforge.net). In some embodiments, a guide sequence is about or more than about 5, 10, 11, 12, 13, 14, 15, 16, 17, 18, 19, 20, 21, 22, 23, 24, 25, 26, 27, 28, 29, 30, 31, 32, 33, 34, 35, 40, 45, 50, 75, or more nucleotides in length.

[0501] In some embodiments, a guide sequence is less than about 75, 50, 45, 40, 35, 30, 25, 20, 15, 12, or fewer nucleotides in length. The ability of a guide sequence to direct sequence-specific binding of a base editor to a target sequence may be assessed by any suitable assay. For example, the components of a base editor, including the guide sequence to be tested, may be provided to a host cell having the corresponding target sequence (e.g., a HGADFN 167 or HGADFN 188 cell line), such as by transfection with vectors encoding the components of a base editor disclosed herein, followed by an assessment of preferential cleavage within the target sequence, such as by Surveyor assay as described herein. Similarly, cleavage of a target polynucleotide sequence may be evaluated in a test tube by providing the target sequence, components of a base editor, including the guide sequence to be tested and a control guide sequence different from the test guide sequence, and comparing binding or rate of cleavage at the target sequence between the test and control guide sequence reactions. Other assays are possible, and will occur to those skilled in the art. The sequences of suitable guide RNAs for targeting Cas9:nucleic acid editing enzyme/domain fusion proteins to specific genomic target sites will be apparent to those of skill in the art based on the instant disclosure. Such suitable guide RNA sequences typically comprise guide sequences that are complementary to a nucleic sequence within 50 nucleotides upstream or downstream of the target nucleotide to be edited. Some exemplary guide RNA sequences suitable for targeting any of the provided fusion proteins to specific target sequences are provided herein. Additional guide sequences are well known in the art and can be used with the base editors described herein.

[0502] Additional exemplary guide sequences are disclosed in, for example, Jinek M., et al., Science 337:816-821(2012); Mali P, Esvelt K M & Church G M (2013) Cas9 as a versatile tool for engineering biology, Nature Methods, 10, 957-963; Li J F et al., (2013) Multiplex and homologous recombination-mediated genome editing in Arabidopsis and Nicotiana benthamiana using guide RNA and Cas9, Nature Biotechnology, 31, 688-691; Hwang, W. Y. et al., Efficient genome editing in zebrafish using a CRISPR-Cas system, Nature Biotechnology 31, 227-229 (2013); Cong L et al., (2013) Multiplex genome engineering using CRISPR/Cas systems, Science, 339, 819-823; Cho S W et al., (2013) Targeted genome engineering in human cells with the Cas9 RNA-guided endonuclease, Nature Biotechnology, 31, 230-232; Jinek, M. et al., RNA-programmed genome editing in human cells, eLife 2, e00471 (2013); Dicarlo, J. E. et al., Genome engineering in Saccharomyces cerevisiae using CRISPR-Cas systems. Nucleic Acid Res. (2013); Briner A E et al., (2014) Guide RNA functional modules direct Cas9 activity and orthogonality, Mol Cell, 56, 333-339, the entire contents of each of which are herein incorporated by reference.

[0503] Some aspects of this disclosure provide methods of making the evolved base editors disclosed herein, or base editor complexes comprising one or more napR/DNAbp-programming nucleic acid molecules (e.g., Cas9 guide RNAs) and a nucleobase editor provided herein. In addition, some aspects of the disclosure provide methods of using the evolved base editors for editing a target nucleotide sequence (e.g., a genome).

### Continuous Evolution Methods

[0504] Various aspects of the disclosure relate to providing continuous evolution methods and systems (e.g., appropriate vectors, cells, phage, flow vessels, etc.).

[0505] The continuous evolution methods provided herein allow for a gene of interest (e.g., a base editor gene) in a viral vector to be evolved over multiple generations of viral life cycles in a flow of host cells to acquire a desired function or activity.

[0506] Some aspects of this invention provide a method of continuous evolution of a gene of interest, comprising (a) contacting a population of host cells with a population of viral vectors comprising the gene of interest, wherein (1) the host cell is amenable to infection by the viral vector; (2) the host cell expresses viral genes required for the generation of viral particles; (3) the expression of at least one viral gene required for the production of an infectious viral particle is dependent on a function of the gene of interest; and (4) the viral vector allows for expression of the protein in the host cell, and can be replicated and packaged into a viral particle by the host cell. In some embodiments, the method comprises (b) contacting the host cells with a mutagen. In some embodiments, the method further comprises (c) incubating the population of host cells under conditions allowing for viral replication and the production of viral particles, wherein host cells are removed from the host cell population, and fresh, uninfected host cells are introduced into the population of host cells, thus replenishing the population of host cells and creating a flow of host cells. The cells are incubated in all embodiments under conditions allowing for the gene of interest to acquire a mutation. In some embodiments, the method further comprises (d) isolating a mutated version of the viral vector, encoding an evolved gene product (e.g., protein), from the population of host cells.

[0507] In some embodiments, a method of phage-assisted continuous evolution is provided comprising (a) contacting a population of bacterial host cells with a population of phages that comprise a gene of interest to be evolved and that are deficient in a gene required for the generation of infectious phage, wherein (1) the phage allows for expression of the gene of interest in the host cells; (2) the host cells are suitable host cells for phage infection, replication, and packaging; and (3) the host cells comprise an expression construct encoding the gene required for the generation of infectious phage, wherein expression of the gene is dependent on a function of a gene product of the gene of interest. In some embodiments the method further comprises (b) incubating the population of host cells under conditions allowing for the mutation of the gene of interest, the production of infectious phage, and the infection of host cells with phage, wherein infected cells are removed from the population of host cells, and wherein the population of host cells is replenished with fresh host cells that have not been infected by the phage. In some embodiments, the method further comprises (c) isolating a mutated phage replication product encoding an evolved protein from the population of host cells.

[0508] In some embodiments, the viral vector or the phage is a filamentous phage, for example, an M13 phage, such as an M13 selection phage as described in more detail elsewhere herein. In some such embodiments, the gene required for the production of infectious viral particles is the M13 gene III (gIII).

[0509] In some embodiments, the viral vector infects mammalian cells. In some embodiments, the viral vector is a retroviral vector. In some embodiments, the viral vector is a vesicular stomatitis virus (VSV) vector. As a dsRNA virus, VSV has a high mutation rate, and can carry cargo, including a gene of interest, of up to 4.5 kb in length. The generation of infectious VSV particles requires the envelope protein VSV-G, a viral glycoprotein that mediates phosphatidylserine attachment and cell entry. VSV can infect a broad spectrum of host cells, including mammalian and insect cells. VSV is therefore a highly suitable vector for continuous evolution in human, mouse, or insect host cells. Similarly, other retroviral vectors that can be pseudotyped with VSV-G envelope protein are equally suitable for continuous evolution processes as described herein.

[0510] It is known to those of skill in the art that many retroviral vectors, for example, Murine Leukemia Virus vectors, or Lentiviral vectors can efficiently be packaged with VSV-G envelope protein as a substitute for the virus's native envelope protein. In some embodiments, such VSV-G packagable vectors are adapted for use in a continuous evolution system in that the native envelope (env) protein (e.g., VSV-G in VSVS vectors, or env in MLV vectors) is deleted from the viral genome, and a gene of interest is inserted into the viral genome under the control of a promoter that is active in the desired host cells. The host cells, in turn, express the VSV-G protein, another env protein suitable for vector pseudotyping, or the viral vector's native env protein, under the control of a promoter the activity of which is dependent on an activity of a product encoded by the gene of interest, so that a viral vector with a mutation leading to an increased activity of the gene of interest will be packaged with higher efficiency than a vector with baseline or a loss-of-function mutation.

[0511] In some embodiments, mammalian host cells are subjected to infection by a continuously evolving population of viral vectors, for example, VSV vectors comprising a gene of interest and lacking the VSV-G encoding gene, wherein the host cells comprise a gene encoding the VSV-G protein under the control of a conditional promoter. Such retrovirus-bases system could be a two-vector system (the viral vector and an expression construct comprising a gene encoding the envelope protein), or, alternatively, a helper virus can be employed, for example, a VSV helper virus. A helper virus typically comprises a truncated viral genome deficient of structural elements required to package the genome into viral particles, but including viral genes encoding proteins required for viral genome processing in the host cell, and for the generation of viral particles. In such embodiments, the viral vector-based system could be a three-vector system (the viral vector, the expression construct comprising the envelope protein driven by a conditional promoter, and the helper virus comprising viral functions required for viral genome propagation but not the envelope protein). In some embodiments, expression of the five genes of the VSV genome from a helper virus or expression construct in the host cells, allows for production of infectious viral particles carrying a gene of interest, indicating that unbalanced gene expression permits viral replication at a reduced rate, suggesting that reduced expression of VSV-G would indeed serve as a limiting step in efficient viral production.

[0512] One advantage of using a helper virus is that the viral vector can be deficient in genes encoding proteins or other functions provided by the helper virus, and can, accordingly, carry a longer gene of interest. In some embodiments, the helper virus does not express an envelope protein, because expression of a viral envelope protein is known to reduce the infectability of host cells by some viral vectors via receptor interference. Viral vectors, for example retroviral vectors, suitable for continuous evolution processes, their respective envelope proteins, and helper viruses for such vectors, are well known to those of skill in the art. For an overview of some exemplary viral genomes, helper viruses, host cells, and envelope proteins suitable for continuous evolution procedures as described herein, see Coffin et al., Retroviruses, CSHL Press 1997, ISBN0-87969-571-4, incorporated herein in its entirety.

[0513] In some embodiments, the incubating of the host cells is for a time sufficient for at least 10, at least 20, at least 30, at least 40, at least 50, at least 100, at least 200, at least 300, at least 400, at least, 500, at least 600, at least 700, at least 800, at least 900, at least 1000, at least 1250, at least 1500, at least 1750, at least 2000, at least 2500, at least 3000, at least 4000, at least 5000, at least 7500, at least 10000, or more consecutive viral life cycles. In certain embodiments, the viral vector is an M13 phage, and the length of a single viral life cycle is about 10-20 minutes.

[0514] In some embodiments, the cells are contacted and/or incubated in suspension culture. For example, in some embodiments, bacterial cells are incubated in suspension culture in liquid culture media. Suitable culture media for bacterial suspension culture will be apparent to those of skill in the art, and the invention is not limited in this regard. See, for example, Molecular Cloning: A Laboratory Manual, 2nd Ed., ed. by Sambrook, Fritsch, and Maniatis (Cold Spring Harbor Laboratory Press: 1989); Elizabeth Kutter and Alexander Sulakvelidze: Bacteriophages: Biology and Applications. CRC Press; 1st edition (December 2004), ISBN: 0849313368; Martha R. J. Clokie and Andrew M. Kropinski: Bacteriophages: Methods and Protocols, Volume 1: Isolation, Characterization, and Interactions (Methods in Molecular Biology) Humana Press; 1st edition (December, 2008), ISBN: 1588296822; Martha R. J. Clokie and Andrew M. Kropinski: Bacteriophages: Methods and Protocols, Volume 2: Molecular and Applied Aspects (Methods in Molecular Biology) Humana Press; 1st edition (December 2008), ISBN: 1603275649; all of which are incorporated herein in their entirety by reference for disclosure of suitable culture media for bacterial host cell culture).Suspension culture typically requires the culture media to be agitated, either continuously or intermittently. This is achieved, in some embodiments, by agitating or stirring the vessel comprising the host cell population. In some embodiments, the outflow of host cells and the inflow of fresh host cells is sufficient to maintain the host cells in suspension. This in particular, if the flow rate of cells into and/or out of the lagoon is high.

[0515] In some embodiments, a viral vector/host cell combination is chosen in which the life cycle of the viral vector is significantly shorter than the average time between cell divisions of the host cell. Average cell division times and viral vector life cycle times are well known in the art for many cell types and vectors, allowing those of skill in the art to ascertain such host cell/vector combinations. In certain embodiments, host cells are being removed from the population of host cells contacted with the viral vector at a rate that results in the average time of a host cell remaining in the host cell population before being removed to be shorter than the average time between cell divisions of the host cells, but to be longer than the average life cycle of the viral vector employed. The result of this is that the host cells, on average, do not have sufficient time to proliferate during their time in the host cell population while the viral vectors do have sufficient time to infect a host cell, replicate in the host cell, and generate new viral particles during the time a host cell remains in the cell population. This assures that the only replicating nucleic acid in the host cell population is the viral vector, and that the host cell genome, the accessory plasmid, or any other nucleic acid constructs cannot acquire mutations allowing for escape from the selective pressure imposed.

[0516] For example, in some embodiments, the average time a host cell remains in the host cell population is about 10, about 11, about 12, about 13, about 14, about 15, about 16, about 17, about 18, about 19, about 20, about 21, about 22, about 23, about 24, about 25, about 30, about 35, about 40, about 45, about 50, about 55, about 60, about 70, about 80, about 90, about 100, about 120, about 150, or about 180 minutes.

[0517] In some embodiments, the average time a host cell remains in the host cell population depends on how fast the host cells divide and how long infection (or conjugation) requires. In general, the flow rate should be faster than the average time required for cell division, but slow enough to allow viral (or conjugative) propagation. The former will vary, for example, with the media type, and can be delayed by adding cell division inhibitor antibiotics (FtsZ inhibitors in E. coli, etc.). Since the limiting step in continuous evolution is production of the protein required for gene transfer from cell to cell, the flow rate at which the vector washes out will depend on the current activity of the gene(s) of interest. In some embodiments, titratable production of the protein required for the generation of infectious particles, as described herein, can mitigate this problem. In some embodiments, an indicator of phage infection allows computer-controlled optimization of the flow rate for the current activity level in real-time.

[0518] In some embodiments, the host cell population is continuously replenished with fresh, uninfected host cells. In some embodiments, this is accomplished by a steady stream of fresh host cells into the population of host cells. In other embodiments, however, the inflow of fresh host cells into the lagoon is semi-continuous or intermittent (e.g., batch-fed). In some embodiments, the rate of fresh host cell inflow into the cell population is such that the rate of removal of cells from the host cell population is compensated. In some embodiments, the result of this cell flow compensation is that the number of cells in the cell population is substantially constant over the time of the continuous evolution procedure. In some embodiments, the portion of fresh, uninfected cells in the cell population is substantially constant over the time of the continuous evolution procedure. For example, in some embodiments, about 10%, about 15%, about 20%, about 25%, about 30%, about 40%, about 50%, about 60%, about 70%, about 75%, about 80%, or about 90% of the cells in the host cell population are not infected by virus. In general, the faster the flow rate of host cells is, the smaller the portion of cells in the host cell population that are infected will be. However, faster flow rates allow for more transfer cycles, e.g., viral life cycles, and, thus, for more generations of evolved vectors in a given period of time, while slower flow rates result in a larger portion of infected host cells in the host cell population and therefore a larger library size at the cost of slower evolution. In some embodiments, the range of effective flow rates is invariably bounded by the cell division time on the slow end and vector washout on the high end In some embodiments, the viral load, for example, as measured in infectious viral particles per volume of cell culture media is substantially constant over the time of the continuous evolution procedure.

[0519] In some embodiments, the fresh host cells comprise the accessory plasmid required for selection of viral vectors, for example, the accessory plasmid comprising the gene required for the generation of infectious phage particles that is lacking from the phages being evolved. In some embodiments, the host cells are generated by contacting an uninfected host cell with the relevant vectors, for example, the accessory plasmid and, optionally, a mutagenesis plasmid, and growing an amount of host cells sufficient for the replenishment of the host cell population in a continuous evolution experiment. Methods for the introduction of plasmids and other gene constructs into host cells are well known to those of skill in the art and the invention is not limited in this respect. For bacterial host cells, such methods include, but are not limited to electroporation and heat-shock of competent cells. In some embodiments, the accessory plasmid comprises a selection marker, for example, an antibiotic resistance marker, and the fresh host cells are grown in the presence of the respective antibiotic to ensure the presence of the plasmid in the host cells. Where multiple plasmids are present, different markers are typically used. Such selection markers and their use in cell culture are known to those of skill in the art, and the invention is not limited in this respect.

[0520] In some embodiments, the host cell population in a continuous evolution experiment is replenished with fresh host cells growing in a parallel, continuous culture. In some embodiments, the cell density of the host cells in the host cell population contacted with the viral vector and the density of the fresh host cell population is substantially the same.

[0521] Typically, the cells being removed from the cell population contacted with the viral vector comprise cells that are infected with the viral vector and uninfected cells. In some embodiments, cells are being removed from the cell populations continuously, for example, by effecting a continuous outflow of the cells from the population. In other embodiments, cells are removed semi-continuously or intermittently from the population. In some embodiments, the replenishment of fresh cells will match the mode of removal of cells from the cell population, for example, if cells are continuously removed, fresh cells will be continuously introduced. However, in some embodiments, the modes of replenishment and removal may be mismatched, for example, a cell population may be continuously replenished with fresh cells, and cells may be removed semi-continuously or in batches.

[0522] In some embodiments, the rate of fresh host cell replenishment and/or the rate of host cell removal is adjusted based on quantifying the host cells in the cell population. For example, in some embodiments, the turbidity of culture media comprising the host cell population is monitored and, if the turbidity falls below a threshold level, the ratio of host cell inflow to host cell outflow is adjusted to effect an increase in the number of host cells in the population, as manifested by increased cell culture turbidity. In other embodiments, if the turbidity rises above a threshold level, the ratio of host cell inflow to host cell outflow is adjusted to effect a decrease in the number of host cells in the population, as manifested by decreased cell culture turbidity. Maintaining the density of host cells in the host cell population within a specific density range ensures that enough host cells are available as hosts for the evolving viral vector population, and avoids the depletion of nutrients at the cost of viral packaging and the accumulation of cell-originated toxins from overcrowding the culture.

[0523] In some embodiments, the cell density in the host cell population and/or the fresh host cell density in the inflow is about 102 cells/ml to about 1012 cells/ml. In some embodiments, the host cell density is about 102 cells/ml, about 103 cells/ml, about 104 cells/ml, about 105 cells/ml, about 5.105 cells/ml, about 106 cells/ml, about 5-106 cells/ml, about 107 cells/ml, about 5-107 cells/ml, about 108 cells/ml, about 5.108 cells/ml, about 109 cells/ml, about 5.109 cells/ml, about 1010 cells/ml, or about 5.1010 cells/ml. In some embodiments, the host cell density is more than about 1010 cells/ml.

[0524] In some embodiments, the host cell population is contacted with a mutagen. In some embodiments, the cell population contacted with the viral vector (e.g., the phage), is continuously exposed to the mutagen at a concentration that allows for an increased mutation rate of the gene of interest, but is not significantly toxic for the host cells during their exposure to the mutagen while in the host cell population. In other embodiments, the host cell population is contacted with the mutagen intermittently, creating phases of increased mutagenesis, and accordingly, of increased viral vector diversification. For example, in some embodiments, the host cells are exposed to a concentration of mutagen sufficient to generate an increased rate of mutagenesis in the gene of interest for about 10%, about 20%, about 50%, or about 75% of the time.

[0525] In some embodiments, the host cells comprise a mutagenesis expression construct, for example, in the case of bacterial host cells, a mutagenesis plasmid. In some embodiments, the mutagenesis plasmid comprises a gene expression cassette encoding a mutagenesis-promoting gene product, for example, a proofreading-impaired DNA polymerase. In other embodiments, the mutagenesis plasmid, including a gene involved in the SOS stress response, (e.g., UmuC, UmuD′, and/or RecA). In some embodiments, the mutagenesis-promoting gene is under the control of an inducible promoter. Suitable inducible promoters are well known to those of skill in the art and include, for example, arabinose-inducible promoters, tetracycline or doxycyclin-inducible promoters, and tamoxifen-inducible promoters. In some embodiments, the host cell population is contacted with an inducer of the inducible promoter in an amount sufficient to effect an increased rate of mutagenesis. For example, in some embodiments, a bacterial host cell population is provided in which the host cells comprise a mutagenesis plasmid in which a dnaQ926, UmuC, UmuD′, and RecA expression cassette is controlled by an arabinose-inducible promoter. In some such embodiments, the population of host cells is contacted with the inducer, for example, arabinose in an amount sufficient to induce an increased rate of mutation.

[0526] The use of an inducible mutagenesis plasmid allows one to generate a population of fresh, uninfected host cells in the absence of the inducer, thus avoiding an increased rate of mutation in the fresh host cells before they are introduced into the population of cells contacted with the viral vector.

[0527] Once introduced into this population, however, these cells can then be induced to support an increased rate of mutation, which is particularly useful in some embodiments of continuous evolution. For example, in some embodiments, the host cell comprise a mutagenesis plasmid as described herein, comprising an arabinose-inducible promoter driving expression of dnaQ926, UmuC, UmuD′, and RecA730 from a pBAD promoter (see, e.g., Khlebnikov A, Skaug T, Keasling JD. Modulation of gene expression from the arabinose-inducible araBAD promoter. J Ind Microbiol Biotechnol. 2002 July; 29(1):34-7; incorporated herein by reference for disclosure of a pBAD promoter). In some embodiments, the fresh host cells are not exposed to arabinose, which activates expression of the above identified genes and, thus, increases the rate of mutations in the arabinose-exposed cells, until the host cells reach the lagoon in which the population of selection phage replicates. Accordingly, in some embodiments, the mutation rate in the host cells is normal until they become part of the host cell population in the lagoon, where they are exposed to the inducer (e.g., arabinose) and, thus, to increased mutagenesis. In some embodiments, a method of continuous evolution is provided that includes a phase of diversifying the population of viral vectors by mutagenesis, in which the cells are incubated under conditions suitable for mutagenesis of the viral vector in the absence of stringent selection for the mutated replication product of the viral vector encoding the evolved protein. This is particularly useful in embodiments in which a desired function to be evolved is not merely an increase in an already present function, for example, an increase in the transcriptional activation rate of a transcription factor, but the acquisition of a function not present in the gene of interest at the outset of the evolution procedure. A step of diversifying the pool of mutated versions of the gene of interest within the population of viral vectors, for example, of phage, allows for an increase in the chance to find a mutation that conveys the desired function.

[0528] In some embodiments, diversifying the viral vector population is achieved by providing a flow of host cells that does not select for gain-of-function mutations in the gene of interest for replication, mutagenesis, and propagation of the population of viral vectors. In some embodiments, the host cells are host cells that express all genes required for the generation of infectious viral particles, for example, bacterial cells that express a complete helper phage, and, thus, do not impose selective pressure on the gene of interest. In other embodiments, the host cells comprise an accessory plasmid comprising a conditional promoter with a baseline activity sufficient to support viral vector propagation even in the absence of significant gain-of-function mutations of the gene of interest. This can be achieved by using a “leaky” conditional promoter, by using a high-copy number accessory plasmid, thus amplifying baseline leakiness, and/or by using a conditional promoter on which the initial version of the gene of interest effects a low level of activity while a desired gain-of-function mutation effects a significantly higher activity.

[0529] For example, as described in more detail in the Example section, in some embodiments, a population of host cells comprising a high-copy accessory plasmid with a gene required for the generation of infectious phage particles is contacted with a selection phage comprising a gene of interest, wherein the accessory plasmid comprises a conditional promoter driving expression of the gene required for the generation from a conditional promoter, the activity of which is dependent on the activity of a gene product encoded by the gene of interest. In some such embodiments, a low stringency selection phase can be achieved by designing the conditional promoter in a way that the initial gene of interest exhibits some activity on that promoter. For example, if a transcriptional activator, such as a T7RNAP or a transcription factor is to be evolved to recognize a non-native target DNA sequence (e.g., a T3RNAP promoter sequence, on which T7RNAP has no activity), a low-stringency accessory plasmid can be designed to comprise a conditional promoter in which the target sequence comprises a desired characteristic, but also retains a feature of the native recognition sequence that allows the transcriptional activator to recognize the target sequence, albeit with less efficiency than its native target sequence. Initial exposure to such a low-stringency accessory plasmid comprising a hybrid target sequence (e.g., a T7/T3 hybrid promoter, with some features of the ultimately desired target sequence and some of the native target sequence) allows the population of phage vectors to diversify by acquiring a plurality of mutations that are not immediately selected against based on the permissive character of the accessory plasmid. Such a diversified population of phage vectors can then be exposed to a stringent selection accessory plasmid, for example, a plasmid comprising in its conditional promoter the ultimately desired target sequence that does not retain a feature of the native target sequence, thus generating a strong negative selective pressure against phage vectors that have not acquired a mutation allowing for recognition of the desired target sequence.

[0530] In some embodiments, an initial host cell population contacted with a population of evolving viral vectors is replenished with fresh host cells that are different from the host cells in the initial population. For example, in some embodiments, the initial host cell population is made of host cells comprising a low-stringency accessory plasmid, or no such plasmid at all, or are permissible for viral infection and propagation. In some embodiments, after diversifying the population of viral vectors in the low-stringency or no-selection host cell population, fresh host cells are introduced into the host cell population that impose a more stringent selective pressure for the desired function of the gene of interest. For example, in some embodiments, the secondary fresh host cells are not permissible for viral replication and propagation anymore. In some embodiments, the stringently selective host cells comprise an accessory plasmid in which the conditional promoter exhibits none or only minimal baseline activity, and/or which is only present in low or very low copy numbers in the host cells.

[0531] Such methods involving host cells of varying selective stringency allow for harnessing the power of continuous evolution methods as provided herein for the evolution of functions that are completely absent in the initial version of the gene of interest, for example, for the evolution of a transcription factor recognizing a foreign target sequence that a native transcription factor, used as the initial gene of interest, does not recognize at all. Or, for another example, the recognition of a desired target sequence by a DNA-binding protein, a recombinase, a nuclease, a zinc-finger protein, or an RNA-polymerase, that does not bind to or does not exhibit any activity directed towards the desired target sequence.

[0532] In some embodiments, negative selection is applied during a continuous evolution method as described herein, by penalizing undesired activities. In some embodiments, this is achieved by causing the undesired activity to interfere with pIII production. For example, expression of an antisense RNA complementary to the gIII RBS and/or start codon is one way of applying negative selection, while expressing a protease (e.g., TEV) and engineering the protease recognition sites into pIII is another.

[0533] In some embodiments, negative selection is applied during a continuous evolution method as described herein, by penalizing the undesired activities of evolved products. This is useful, for example, if the desired evolved product is an enzyme with high specificity, for example, a transcription factor or protease with altered, but not broadened, specificity. In some embodiments, negative selection of an undesired activity is achieved by causing the undesired activity to interfere with pIII production, thus inhibiting the propagation of phage genomes encoding gene products with an undesired activity. In some embodiments, expression of a dominant-negative version of pIII or expression of an antisense RNA complementary to the gIII RBS and/or gIII start codon is linked to the presence of an undesired activity. In some embodiments, a nuclease or protease cleavage site, the recognition or cleavage of which is undesired, is inserted into a pIII transcript sequence or a pIII amino acid sequence, respectively. In some embodiments, a transcriptional or translational repressor is used that represses expression of a dominant negative variant of pIII and comprises a protease cleavage site the recognition or cleavage of which is undesired.

[0534] In some embodiments, counter-selection against activity on non-target substrates is achieved by linking undesired evolved product activities to the inhibition of phage propagation. For example, in some embodiments, in which a transcription factor is evolved to recognize a specific target sequence, but not an undesired off-target sequence, a negative selection cassette is employed, comprising a nucleic acid sequence encoding a dominant-negative version of pIII (pIII-neg) under the control of a promoter comprising the off-target sequence. If an evolution product recognizes the off-target sequence, the resulting phage particles will incorporate pIII-neg, which results in an inhibition of phage infective potency and phage propagation, thus constituting a selective disadvantage for any phage genomes encoding an evolution product exhibiting the undesired, off-target activity, as compared to evolved products not exhibiting such an activity. In some embodiments, a dual selection strategy is applied during a continuous evolution experiment, in which both positive selection and negative selection constructs are present in the host cells. In some such embodiments, the positive and negative selection constructs are situated on the same plasmid, also referred to as a dual selection accessory plasmid.

[0535] For example, in some embodiments, a dual selection accessory plasmid is employed comprising a positive selection cassette, comprising a pIII-encoding sequence under the control of a promoter comprising a target nucleic acid sequence, and a negative selection cassette, comprising a pIII-neg encoding cassette under the control of a promoter comprising an off-target nucleic acid sequence. One advantage of using a simultaneous dual selection strategy is that the selection stringency can be fine-tuned based on the activity or expression level of the negative selection construct as compared to the positive selection construct. Another advantage of a dual selection strategy is the selection is not dependent on the presence or the absence of a desired or an undesired activity, but on the ratio of desired and undesired activities, and, thus, the resulting ratio of pIII and pIII-neg that is incorporated into the respective phage particle.

[0536] Some aspects of this invention provide or utilize a dominant negative variant of pIII (pIII-neg). These aspects are based on the surprising discovery that a pIII variant that comprises the two N-terminal domains of pIII and a truncated, termination-incompetent C-terminal domain is not only inactive but is a dominant-negative variant of pIII. A pIII variant comprising the two N-terminal domains of pIII and a truncated, termination-incompetent C-terminal domain was described in Bennett, N. J.; Rakonjac, J., Unlocking of the filamentous bacteriophage virion during infection is mediated by the C domain of pII. Journal of Molecular Biology 2006, 356 (2), 266-73; the entire contents of which are incorporated herein by reference. However, the dominant negative property of such pIII variants has not been previously described. Some aspects of this invention are based on the surprising discovery that a pIII-neg variant as provided herein is efficiently incorporated into phage particles, but it does not catalyze the unlocking of the particle for entry during infection, rendering the respective phage noninfectious even if wild type pIII is present in the same phage particle. Accordingly, such pIII-neg variants are useful for devising a negative selection strategy in the context of PACE, for example, by providing an expression construct comprising a nucleic acid sequence encoding a pIII-neg variant under the control of a promoter comprising a recognition motif, the recognition of which is undesired. In other embodiments, pIII-neg is used in a positive selection strategy, for example, by providing an expression construct in which a pIII-neg encoding sequence is controlled by a promoter comprising a nuclease target site or a repressor recognition site, the recognition of either one is desired.

[0537] Positive and negative selection strategies can further be designed to link non-DNA directed activities to phage propagation efficiency. For example, protease activity towards a desired target protease cleavage site can be linked to pIII expression by devising a repressor of gene expression that can be inactivated by a protease recognizing the target site. In some embodiments, pIII expression is driven by a promoter comprising a binding site for such a repressor. Suitable transcriptional repressors are known to those in the art, and one exemplary repressor is the lambda repressor protein, that efficiently represses the lambda promoter pR and can be modified to include a desired protease cleavage site (see, e.g., Sices, H. J.; Kristie, T. M., A genetic screen for the isolation and characterization of site-specific proteases. Proc Natl Acad Sci USA 1998, 95 (6), 2828-33; and Sices, H. J.; Leusink, M. D.; Pacheco, A.; Kristie, T. M., Rapid genetic selection of inhibitor-resistant protease mutants: clinically relevant and novel mutants of the HIV protease. AIDS Res Hum Retroviruses 2001, 17 (13), 1249-55, the entire contents of each of which are incorporated herein by reference). The lambda repressor (cI) contains an N-terminal DNA binding domain and a C-terminal dimerization domain. These two domains are connected by a flexible linker. Efficient transcriptional repression requires the dimerization of cI, and, thus, cleavage of the linker connecting dimerization and binding domains results in abolishing the repressor activity of cI.

[0538] Some embodiments provide a pIII expression construct that comprises a pR promoter (containing cI binding sites) driving expression of pIII. When expressed together with a modified cI comprising a desired protease cleavage site in the linker sequence connecting dimerization and binding domains, the cI molecules will repress pIII transcription in the absence of the desired protease activity, and this repression will be abolished in the presence of such activity, thus providing a linkage between protease cleavage activity and an increase in pIII expression that is useful for positive PACE protease selection. Some embodiments provide a negative selection strategy against undesired protease activity in PACE evolution products. In some embodiments, the negative selection is conferred by an expression cassette comprising a pIII-neg encoding nucleic acid under the control of a cI-repressed promoter. When co-expressed with a cI repressor protein comprising an undesired protease cleavage site, expression of pIII-neg will occur in cell harboring phage expressing a protease exhibiting protease activity towards the undesired target site, thus negatively selecting against phage encoding such undesired evolved products. A dual selection for protease target specificity can be achieved by co-expressing cI-repressible pIII and pIII-neg encoding expression constructs with orthogonal cI variants recognizing different DNA target sequences, and thus allowing for simultaneous expression without interfering with each other. Orthogonal cI variants in both dimerization specificity and DNA-binding specificity are known to those of skill in the art (see, e.g., Wharton, R. P.; Ptashne, M., Changing the binding specificity of a repressor by redesigning an alphahelix. Nature 1985, 316 (6029), 601-5; and Wharton, R. P.; Ptashne, M., A new-specificity mutant of 434 repressor that defines an amino acid-base pair contact. Nature 1987, 326 (6116), 888-91, the entire contents of each of which are incorporated herein by reference).

[0539] Other selection schemes for gene products having a desired activity are well known to those of skill in the art or will be apparent from the instant disclosure. Selection strategies that can be used in continuous evolution processes and methods as provided herein include, but are not limited to, selection strategies useful in two-hybrid screens. For example, the T7 RNAP selection strategy described in more detail elsewhere herein is an example of a promoter recognition selection strategy. Two-hybrid accessory plasmid setups further permit the evolution of protein-protein interactions, and accessory plasmids requiring site-specific recombinase activity for production of the protein required for the generation of infectious viral particles, for example, pIII, allow recombinases to be evolved to recognize any desired target site. A two-hybrid setup or a related one-hybrid setup can further be used to evolve DNA-binding proteins, while a three-hybrid setup can evolve RNA-protein interactions.

[0540] Biosynthetic pathways producing small molecules can also be evolved with a promoter or riboswitch (e.g., controlling gene III expression/translation) that is responsive to the presence of the desired small molecule. For example, a promoter that is transcribed only in the presence of butanol could be placed on the accessory plasmid upstream of gene III to optimize a biosynthetic pathway encoding the enzymes for butanol synthesis. A phage vector carrying a gene of interest that has acquired an activity boosting butanol synthesis would have a selective advantage over other phages in an evolving phage population that have not acquired such a gain-of-function. Alternatively, a chemical complementation system, for example, as described in Baker and Cornish, PNAS, 2002, incorporated herein by reference, can be used to evolve individual proteins or enzymes capable of bond formation reactions ( ). In other embodiments, a trans-splicing intron designed to splice itself into a particular target sequence can be evolved by expressing only the latter half of gene III from the accessory plasmid, preceded by the target sequence, and placing the other half (fused to the trans-splicing intron) on the selection phage. Successful splicing would reconstitute full-length pIII-encoding mRNA. Protease specificity and activity can be evolved by expressing pIII fused to a large protein from the accessory plasmid, separated by a linker containing the desired protease recognition site. Cleavage of the linker by active protease encoded by the selection phage would result in infectious pIII, while uncleaved pIII would be unable to bind due to the blocking protein. Further, As described, for example, by Malmborg and Borrebaeck 1997, a target antigen can be fused to the F pilus of a bacteria, blocking wild-type pIII from binding. Phage displaying antibodies specific to the antigen could bind and infect, yielding enrichments of >1000-fold in phage display. In some embodiments, this system can be adapted for continuous evolution, in that the accessory plasmid is designed to produce wild-type pIII to contact the tolA receptor and perform the actual infection (as the antibody-pIII fusion binds well but infects with low efficiency), while the selection phage encodes the pIII-antibody fusion protein. Progeny phage containing both types of pIII tightly adsorb to the F pilus through the antibody-antigen interaction, with the wild-type pIII contacting tolA and mediating high-efficiency infection. To allow propagation when the initial antibody-antigen interaction is weak, a mixture of host cells could flow into the lagoon: a small fraction expressing wild-type pili and serving as a reservoir of infected cells capable of propagating any selection phage regardless of activity, while the majority of cells requires a successful interaction, serving as the “reward” for any mutants that improve their binding affinity. This last system, in some embodiments, can evolve new antibodies that are effective against a target pathogen faster than the pathogen itself can evolve, since the evolution rates of PACE and other systems described herein are higher than those of human-specific pathogens, for example, those of human viruses.

[0541] Methods and strategies to design conditional promoters suitable for carrying out the selections strategies described herein are well known to those of skill in the art. Some exemplary design strategies are summarized in FIG. 3B. For an overview over exemplary suitable selection strategies and methods for designing conditional promoters driving the expression of a gene required for cell-cell gene transfer, e.g. gIII, see Vidal and Legrain, Yeast n-hybrid review, Nucleic Acid Research 27, 919 (1999), incorporated herein in its entirety.

### Apparatus for Continued Evolution

[0542] The invention also provides apparatuses for continuous evolution of a nucleic acid. The core element of such an apparatus is a lagoon allowing for the generation of a flow of host cells in which a population of viral vectors can replicate and propagate. In some embodiments, the lagoon comprises a cell culture vessel comprising an actively replicating population of viral vectors, for example, phage vectors comprising a gene of interest, and a population of host cells, for example, bacterial host cells. In some embodiments, the lagoon comprises an inflow for the introduction of fresh host cells into the lagoon and an outflow for the removal of host cells from the lagoon. In some embodiments, the inflow is connected to a turbidostat comprising a culture of fresh host cells. In some embodiments, the outflow is connected to a waste vessel, or a sink. In some embodiments, the lagoon further comprises an inflow for the introduction of a mutagen into the lagoon. In some embodiments that inflow is connected to a vessel holding a solution of the mutagen. In some embodiments, the lagoon comprises an inflow for the introduction of an inducer of gene expression into the lagoon, for example, of an inducer activating an inducible promoter within the host cells that drives expression of a gene promoting mutagenesis (e.g., as part of a mutagenesis plasmid), as described in more detail elsewhere herein. In some embodiments, that inflow is connected to a vessel comprising a solution of the inducer, for example, a solution of arabinose.

[0543] In some embodiments, the lagoon comprises a population of viral vectors. In some embodiments, the lagoon comprises a population of viral vectors. In some embodiments, the viral vectors are phage, for example, M13 phages deficient in a gene required for the generation of infectious viral particles as described herein. In some such embodiments, the host cells are prokaryotic cells amenable to phage infection, replication, and propagation of phage, for example, host cells comprising an accessory plasmid comprising a gene required for the generation of infectious viral particles under the control of a conditional promoter as described herein.

[0544] In some embodiments, the lagoon comprises a controller for regulation of the inflow and outflow rates of the host cells, the inflow of the mutagen, and/or the inflow of the inducer. In some embodiments, a visual indicator of phage presence, for example, a fluorescent marker, is tracked and used to govern the flow rate, keeping the total infected population constant. In some embodiments, the visual marker is a fluorescent protein encoded by the phage genome, or an enzyme encoded by the phage genome that, once expressed in the host cells, results in a visually detectable change in the host cells. In some embodiments, the visual tracking of infected cells is used to adjust a flow rate to keep the system flowing as fast as possible without risk of vector washout.

[0545] In some embodiments, the expression of the gene required for the generation of infectious particles is titratable. In some embodiments, this is accomplished with an accessory plasmid producing pIII proportional to the amount of anhydrotetracycline added to the lagoon. Other In some embodiments, such a titrable expression construct can be combined with another accessory plasmid as described herein, allowing simultaneous selection for activity and titratable control of pIII. This permits the evolution of activities too weak to otherwise survive in the lagoon, as well as allowing neutral drift to escape local fitness peak traps. In some embodiments, negative selection is applied during a continuous evolution method as described herein, by penalizing undesired activities.

[0546] In some embodiments, this is achieved by causing the undesired activity to interfere with pIII production. For example, expression of an antisense RNA complementary to the gIII RBS and/or start codon is one way of applying negative selection, while expressing a protease (e.g., TEV) and engineering the protease recognition sites into pIII is another.

[0547] In some embodiments, the apparatus comprises a turbidostat. In some embodiments, the turbidostat comprises a cell culture vessel in which the population of fresh host cells is situated, for example, in liquid suspension culture. In some embodiments, the turbidostat comprises an outflow that is connected to an inflow of the lagoon, allowing the introduction of fresh cells from the turbidostat into the lagoon. In some embodiments, the turbidostat comprises an inflow for the introduction of fresh culture media into the turbidostat. In some embodiments, the inflow is connected to a vessel comprising sterile culture media. In some embodiments, the turbidostat further comprises an outflow for the removal of host cells from the turbidostat. In some embodiments, that outflow is connected to a waste vessel or drain.

[0548] In some embodiments, the turbidostat comprises a turbidity meter for measuring the turbidity of the culture of fresh host cells in the turbidostat. In some embodiments, the turbidostat comprises a controller that regulated the inflow of sterile liquid media and the outflow into the waste vessel based on the turbidity of the culture liquid in the turbidostat.

[0549] In some embodiments, the lagoon and/or the turbidostat comprises a shaker or agitator for constant or intermittent agitation, for example, a shaker, mixer, stirrer, or bubbler, allowing for the population of host cells to be continuously or intermittently agitated and oxygenated.

[0550] In some embodiments, the controller regulates the rate of inflow of fresh host cells into the lagoon to be substantially the same (volume/volume) as the rate of outflow from the lagoon. In some embodiments, the rate of inflow of fresh host cells into and/or the rate of outflow of host cells from the lagoon is regulated to be substantially constant over the time of a continuous evolution experiment. In some embodiments, the rate of inflow and/or the rate of outflow is from about 0.1 lagoon volumes per hour to about 25 lagoon volumes per hour. In some embodiments, the rate of inflow and/or the rate of outflow is approximately 0.1 lagoon volumes per hour (lv/h), approximately 0.2 lv/h, approximately 0.25 lv/h, approximately 0.3 lv/h, approximately 0.4 lv/h, approximately 0.5 lv/h, approximately 0.6 lv/h, approximately 0.7 lv/h, approximately 0.75 lv/h, approximately 0.8 lv/h, approximately 0.9 lv/h, approximately 1 lv/h, approximately 2 lv/h, approximately 2.5 lv/h, approximately 3 lv/h, approximately 4 lv/h, approximately 5 lv/h, approximately 7.5 lv/h, approximately 10 lv/h, or more than 10 lv/h.

[0551] In some embodiments, the inflow and outflow rates are controlled based on a quantitative assessment of the population of host cells in the lagoon, for example, by measuring the cell number, cell density, wet biomass weight per volume, turbidity, or cell growth rate. In some embodiments, the lagoon inflow and/or outflow rate is controlled to maintain a host cell density of from about 102 cells/ml to about 1012 cells/ml in the lagoon. In some embodiments, the inflow and/or outflow rate is controlled to maintain a host cell density of about 102 cells/ml, about 103 cells/ml, about 104 cells/ml, about 105 cells/ml, about 5×105 cells/ml, about 106 cells/ml, about 5×106 cells/ml, about 107 cells/ml, about 5×107 cells/ml, about 108 cells/ml, about 5×108 cells/ml, about 109 cells/ml, about 5×109 cells/ml, about 1010 cells/ml, about 5×1010 cells/ml, or more than 5×1010 cells/ml, in the lagoon. In some embodiments, the density of fresh host cells in the turbidostat and the density of host cells in the lagoon are substantially identical.

[0552] In some embodiments, the lagoon inflow and outflow rates are controlled to maintain a substantially constant number of host cells in the lagoon. In some embodiments, the inflow and outflow rates are controlled to maintain a substantially constant frequency of fresh host cells in the lagoon. In some embodiments, the population of host cells is continuously replenished with fresh host cells that are not infected by the phage. In some embodiments, the replenishment is semi-continuous or by batch-feeding fresh cells into the cell population.

[0553] In some embodiments, the lagoon volume is from approximately 1 ml to approximately 100 l, for example, the lagoon volume is approximately 1 ml, approximately 10 ml, approximately 50 ml, approximately 100 ml, approximately 200 ml, approximately 250 ml, approximately 500 ml, approximately 750 ml, approximately 11, approximately 2 ml, approximately 2.51, approximately 31, approximately 4 l, approximately 5 l, approximately 10 l, approximately 1 ml-10 ml, approximately 10m-50 ml, approximately 50 ml-100, approximately 100 ml-250 ml, approximately 250 ml-500 ml, approximately 500 ml-1 l, approximately 1 l-2 l, approximately 2 l-5 l, approximately 51-10 l, approximately 10-50 l, approximately 50-100 l, or more than 100 l.

[0554] In some embodiments, the lagoon and/or the turbidostat further comprises a heater and a thermostat controlling the temperature. In some embodiments, the temperature in the lagoon and/or the turbidostat is controlled to be from about 4° C. to about 55° C., preferably from about 25° C. to about 39° C., for example, about 37° C.

[0555] In some embodiments, the inflow rate and/or the outflow rate is controlled to allow for the incubation and replenishment of the population of host cells for a time sufficient for at least 10, at least 20, at least 30, at least 40, at least 50, at least 100, at least 200, at least 300, at least 400, at least, 500, at least 600, at least 700, at least 800, at least 900, at least 1000, at least 1250, at least 1500, at least 1750, at least 2000, at least 2500, at least 3000, at least 4000, at least 5000, at least 7500, at least 10000, or more consecutive viral vector or phage life cycles. In some embodiments, the time sufficient for one phage life cycle is about 10 minutes.

[0556] Therefore, in some embodiments, the time of the entire evolution procedure is about 12 hours, about 18 hours, about 24 hours, about 36 hours, about 48 hours, about 50 hours, about 3 days, about 4 days, about 5 days, about 6 days, about 7 days, about 10 days, about two weeks, about 3 weeks, about 4 weeks, or about 5 weeks.

[0557] For example, in some embodiments, a PACE apparatus is provided, comprising a lagoon of about 100 ml, or about 1 l volume, wherein the lagoon is connected to a turbidostat of about 0.5 l, 1 l, or 3 l volume, and to a vessel comprising an inducer for a mutagenesis plasmid, for example, arabinose, wherein the lagoon and the turbidostat comprise a suspension culture of E. coli cells at a concentration of about 5×108 cells/ml. In some embodiments, the flow of cells through the lagoon is regulated to about 3 lagoon volumes per hour. In some embodiments, cells are removed from the lagoon by continuous pumping, for example, by using a waste needle set at a height of the lagoon vessel that corresponds to a desired volume of fluid (e.g., about 100 ml, in the lagoon. In some embodiments, the host cells are E. coli cells comprising the F′ plasmid, for example, cells of the genotype F′proA+B+Δ(lacIZY) zzf::Tn10(TetR)/endA1 recA1 galE15 galK16 nupG rpsL ΔlacIZYA araD139 Δ(ara,leu)7697 mcrA Δ(mrr-hsdRMS-mcrBC) proBA::pir116 λ−. In some embodiments, the selection phage comprises an M13 genome, in which the pIII-encoding region, or a part thereof, has been replaced with a gene of interest, for example, a coding region that is driven by a wild-type phage promoter. In some embodiments, the host cells comprise an accessory plasmid in which a gene encoding a protein required for the generation of infectious phage particles, for example, M13 pIII, is expressed from a conditional promoter as described in more detail elsewhere herein. In some embodiments, the host cells further comprise a mutagenesis plasmid, for example, a mutagenesis plasmid expressing a mutagenesis-promoting protein from an inducible promoter, such as an arabinose-inducible promoter. In some embodiments the apparatus is set up to provide fresh media to the turbidostat for the generation of a flow of cells of about 2-4 lagoon volumes per hour for about 3-7 days.

### Vectors and Reagents

[0558] The invention provides viral vectors for the inventive continuous evolution processes. In some embodiments, phage vectors for phage-assisted continuous evolution are provided. In some embodiments, a selection phage is provided that comprises a phage genome deficient in at least one gene required for the generation of infectious phage particles and a gene of interest to be evolved.

[0559] For example, in some embodiments, the selection phage comprises an M13 phage genome deficient in a gene required for the generation of infectious M13 phage particles, for example, a full-length gIII. In some embodiments, the selection phage comprises a phage genome providing all other phage functions required for the phage life cycle except the gene required for generation of infectious phage particles. In some such embodiments, an M13 selection phage is provided that comprises a gI, gII, gIV, gV, gVI, gVII, gVIII, gIX, and a gX gene, but not a full-length gIIL. In some embodiments, the selection phage comprises a 3′-fragment of gIII, but no full-length gIIL. The 3′-end of gIII comprises a promoter (see FIG. 16) and retaining this promoter activity is beneficial, in some embodiments, for an increased expression of gVI, which is immediately downstream of the gIII 3′-promoter, or a more balanced (wild-type phage-like) ratio of expression levels of the phage genes in the host cell, which, in turn, can lead to more efficient phage production. In some embodiments, the 3′-fragment of gIII gene comprises the 3′-gIII promoter sequence. In some embodiments, the 3′-fragment of gIII comprises the last 180 bp, the last 150 bp, the last 125 bp, the last 100 bp, the last 50 bp, or the last 25 bp of gII. In some embodiments, the 3′-fragment of gIII comprises the last 180 bp of gIII.

[0560] M13 selection phage is provided that comprises a gene of interest in the phage genome, for example, inserted downstream of the gVIII 3′-terminator and upstream of the gIII-3′-promoter. In some embodiments, an M13 selection phage is provided that comprises a multiple cloning site for cloning a gene of interest into the phage genome, for example, a multiple cloning site (MCS) inserted downstream of the gVIII 3′-terminator and upstream of the gIII-3′-promoter.

[0561] Some aspects of this invention provide a vector system for continuous evolution procedures, comprising of a viral vector, for example, a selection phage, and a matching accessory plasmid. In some embodiments, a vector system for phage-based continuous directed evolution is provided that comprises (a) a selection phage comprising a gene of interest to be evolved, wherein the phage genome is deficient in a gene required to generate infectious phage; and (b) an accessory plasmid comprising the gene required to generate infectious phage particle under the control of a conditional promoter, wherein the conditional promoter is activated by a function of a gene product encoded by the gene of interest.

[0562] In some embodiments, the selection phage is an M13 phage as described herein. For example, in some embodiments, the selection phage comprises an M13 genome including all genes required for the generation of phage particles, for example, gI, gII, gIV, gV, gVI, gVII, gVIII, gIX, and gX gene, but not a full-length gIII gene. In some embodiments, the selection phage genome comprises an F1 or an M13 origin of replication. In some embodiments, the selection phage genome comprises a 3′-fragment of gIII gene. In some embodiments, the selection phage comprises a multiple cloning site upstream of the gIII 3′-promoter and downstream of the gVIII 3′-terminator.

[0563] In some embodiments, the selection phage does not comprise a full length gVI. GVI is similarly required for infection as gIII and, thus, can be used in a similar fashion for selection as described for gIII herein. However, it was found that continuous expression of pIII renders some host cells resistant to infection by M13. Accordingly, it is desirable that pIII is produced only after infection. This can be achieved by providing a gene encoding pIII under the control of an inducible promoter, for example, an arabinose-inducible promoter as described herein, and providing the inducer in the lagoon, where infection takes place, but not in the turbidostat, or otherwise before infection takes place. In some embodiments, multiple genes required for the generation of infectious phage are removed from the selection phage genome, for example, gIII and gVI, and provided by the host cell, for example, in an accessory plasmid as described herein.

[0564] The vector system may further comprise a helper phage, wherein the selection phage does not comprise all genes required for the generation of phage particles, and wherein the helper phage complements the genome of the selection phage, so that the helper phage genome and the selection phage genome together comprise at least one functional copy of all genes required for the generation of phage particles, but are deficient in at least one gene required for the generation of infectious phage particles.

[0565] In some embodiments, the accessory plasmid of the vector system comprises an expression cassette comprising the gene required for the generation of infectious phage under the control of a conditional promoter. In some embodiments, the accessory plasmid of the vector system comprises a gene encoding pIII under the control of a conditional promoter the activity of which is dependent on a function of a product of the gene of interest.

[0566] In some embodiments, the vector system further comprises a mutagenesis plasmid, for example, an arabinose-inducible mutagenesis plasmid as described herein.

[0567] In some embodiments, the vector system further comprises a helper plasmid providing expression constructs of any phage gene not comprised in the phage genome of the selection phage or in the accessory plasmid.

[0568] In various embodiments of the vectors used herein in the continuous evolution processes may include the following components in any combination:

gRNA backbone
(SEQ ID NO: 199)
gttttagagctagaaatagcaagttaaaataaggctagtccgttatcaac
ttgaaaaagtggcaccgagtcggtgcttttttt
T7 RNA Polymerase
(SEQ ID NO: 346)
MNTINIAKNDFSDIELAAIPFNTLADHYGERLAREQLALEHESYEMGEAR
FRKMFERQLKAGEVADNAAAKPLITTLLPKMIARINDWFEEVKAKRGKRP
TAFQFLQEIKPEAVAYITIKTTLACLTSADNTTVQAVASAIGRAIEDEAR
FGRIRDLKAKHFKKNVEEQLNKRVGHVYKKAFMQVVEADMLSKGLLGGEA
WSSWHKEDSIHVGVRCIEMLIESTGMVSLHRQNAGVVGQDSETIELAPEY
AEAIATRAGALAGISPMFQPCVVPPKPWTGITGGGYWANGRRPLALVRTH
SKKALMRYEDVYMPEVYKAINIAQNTAWKINKKVLAVANVITKWKHCPVE
DIPAIEREELPMKPEDIDMNPEALTAWKRAAAAVYRKDKARKSRRISLEF
MLEQANKFANHKAIWFPYNMDWRGRVYAVSMFNPQGNDMTKGLLTLAKGK
PIGKEGYYWLKIHGANCAGVDKVPFPERIKFIEENHENIMACAKSPLENT
WWAEQDSPFCFLAFCFEYAGVQHHGLSYNCSLPLAFDGSCSGIQHFSAML
RDEVGGRAVNLLPSETVQDIYGIVAKKVNEILQADAINGTDNEVVTVTDE
NTGEISEKVKLGTKALAGQWLAYGVTRSVTKRSVMTLAYGSKEFGFRQQV
LEDTIQPAIDSGKGLMFTQPNQAAGYMAKLIWESVSVTVVAAVEAMNWLK
SAAKLLAAEVKDKKTGEILRKRCAVHWVTPDGFPVWQEYKKPIQTRLNLM
FLGQFRLQPTINTNKDSEIDAHKQESGIAPNFVHSQDGSHLRKTVVWAHE
KYGIESFALIHDSFGTIPADAANLFKAVRETMVDTYESCDVLADFYDQFN
LNLRDIADQLHESQLDKMPALPAKGLESDFAFA*
Degron tag
(SEQ ID NO: 348)
AANDENYNYALAA
Fusion sequence
(SEQ ID NO: 196)
MNTINIAKNDFSDIELAAIPFNTLADHYGERLAREQLALEHESYEMGEAR
FRKMFERQLKAGEVADNAAAKPLITTLLPKMIARINDWFEEVKAKRGKRP
TAFQFLQEIKPEAVAYITIKTTLACLTSADNTTVQAVASAIGRAIEDEAR
FGRIRDLKAKHFKKNVEEQLNKRVGHVYKKAFMQVVEADMLSKGLLGGEA
WSSWHKEDSIHVGVRCIEMLIESTGMVSLHRQNAGVVGQDSETIELAPEY
AEAIATRAGALAGISPMFQPCVVPPKPWTGITGGGYWANGRRPLALVRTH
SKKALMRYEDVYMPEVYKAINIAQNTAWKINKKVLAVANVITKWKHCPVE
DIPAIEREELPMKPEDIDMNPEALTAWKRAAAAVYRKDKARKSRRISLEF
MLEQANKFANHKAIWFPYNMDWRGRVYAVSMFNPQGNDMTKGLLTLAKGK
PIGKEGYYWLKIHGANCAGVDKVPFPERIKFIEENHENIMACAKSPLENT
WWAEQDSPFCFLAFCFEYAGVQHHGLSYNCSLPLAFDGSCSGIQHFSAML
RDEVGGRAVNLLPSETVQDIYGIVAKKVNEILQADAINGTDNEVVTVTDE
NTGEISEKVKLGTKALAGQWLAYGVTRSVTKRSVMTLAYGSKEFGFRQQV
LEDTIQPAIDSGKGLMFTQPNQAAGYMAKLIWESVSVTVVAAVEAMNWLK
SAAKLLAAEVKDKKTGEILRKRCAVHWVTPDGFPVWQEYKKPIQTRLNLM
FLGQFRLQPTINTNKDSEIDAHKQESGIAPNFVHSQDGSHLRKTVVWAHE
KYGIESFALIHDSFGTIPADAANLFKAVRETMVDTYESCDVLADFYDQFA
DQLHESQLDKMPALPAKGNLNLRDILESDFAFAWTRAANDENYNYALAA*
DnaE intein (fusion to deaminases via the XTEN
linker)
(SEQ ID NO: 200)
CLSYETEILTVEYGLLPIGKIVEKRIECTVYSVDNNGNIYTQPVAQWHDR
GEQEVFEYCLEDGSLIRATKDHKFMTVDGQMLPIDEIFERELDLMRVDNL
PN*
Fusion to APOBEC
(SEQ ID NO: 197)
MSSETGPVAVDPTLRRRIEPHEFEVFFDPRELRKETCLLYEINWGGRHSI
WRHTSQNTNKHVEVNFIEKFTTERYFCPNTRCSITWFLSWSPCGECSRAI
TEFLSRYPHVTLFIYIARLYHHADPRNRQGLRDLISSGVTIQIMTEQESG
YCWRNFVNYSPSNEAHWPRYPHLWVRLYVLELYCIILGLPPCLNILRRKQ
PQLTFFTIALQSCHYQRLPPHILWATGLKSGSETPGTSESATPECLSYET
EILTVEYGLLPIGKIVEKRIECTVYSVDNNGNIYTQPVAQWHDRGEQEVF
EYCLEDGSLIRATKDHKFMTVDGQMLPIDEIFERELDLMRVDNLPN*
C-intein fused to cas9
(SEQ ID NO: 201)
MIKIATRKYLGKQNVYDIGVERDHNFALKNGFIASNC
Fusion to cas9
(SEQ ID NO: 198)
MIKIATRKYLGKQNVYDIGVERDHNFALKNGFIASNCFNKYSIGLAIGTN
SVGWAVITDEYKVPSKKFKVLGNTDRHSIKKNLIGALLFDSGETAEATRL
KRTARRRYTRRKNRICYLQEIFSNEMAKVDDSFFHRLEESFLVEEDKKHE
RHPIFGNIVDEVAYHEKYPTIYHLRKKLVDSTDKADLRLIYLALAHMIKF
RGHFLIEGDLNPDNSDVDKLFIQLVQTYNQLFEENPINASGVDAKAILSA
RLSKSRRLENLIAQLPGEKKNGLFGNLIALSLGLTPNFKSNFDLAEDAKL
QLSKDTYDDDLDNLLAQIGDQYADLFLAAKNLSDAILLSDILRVNTEITK
APLSASMIKRYDEHHQDLTLLKALVRQQLPEKYKEIFFDQSKNGYAGYID
GGASQEEFYKFIKPILEKMDGTEELLVKLNREDLLRKQRTFDNGSIPHQI
HLGELHAILRRQEDFYPFLKDNREKIEKILTFRIPYYVGPLARGNSRFAW
MTRKSEETITPWNFEEVVDKGASAQSFIERMTNFDKNLPNEKVLPKHSLL
YEYFTVYNELTKVKYVTEGMRKPAFLSGEQKKAIVDLLFKTNRKVTVKQL
KEDYFKKIECFDSVEISGVEDRFNASLGTYHDLLKIIKDKDFLDNEENED
ILEDIVLTLTLFEDREMIEERLKTYAHLFDDKVMKQLKRRRYTGWGRLSR
KLINGIRDKQSGKTILDFLKSDGFANRNFMQLIHDDSLTFKEDIQKAQVS
GQGDSLHEHIANLAGSPAIKKGILQTVKVVDELVKVMGRHKPENIVIEMA
RENQTTQKGQKNSRERMKRIEEGIKELGSQILKEHPVENTQLQNEKLYLY
YLQNGRDMYVDQELDINRLSDYDVDAIVPQSFLKDDSIDNKVLTRSDKNR
GKSDNVPSEEVVKKMKNYWRQLLNAKLITQRKFDNLTKAERGGLSELDKA
GFIKRQLVETRQITKHVAQILDSRMNTKYDENDKLIREVKVITLKSKLVS
DFRKDFQFYKVREINNYHHAHDAYLNAVVGTALIKKYPKLESEFVYGDYK
VYDVRKMIAKSEQEIGKATAKYFFYSNIMNFFKTEITLANGEIRKRPLIE
TNGETGEIVWDKGRDFATVRKVLSMPQVNIVKKTEVQTGGFSKESILPKR
NSDKLIARKKDWDPKKYGGFDSPTVAYSVLVVAKVEKGKSKKLKSVKELL
GITIMERSSFEKNPIDFLEAKGYKEVKKDLIIKLPKYSLFELENGRKRML
ASAGELQKGNELALPSKYVNFLYLASHYEKLKGSPEDNEQKQLFVEQHKH
YLDEIIEQISEFSKRVILADANLDKVLSAYNKHRDKPIREQAENIIHLFT
LTNLGAPAAFKYFDTTIDRKRYTSTKEVLDATLIHQSITGLYETRIDLSQ
LGGDSGGSMTNLSDIIEKETGKQLVIQESILMLPEEVEEVIGNKPESDIL
VHTAYDESTDENVMLLTSDAPEYKPWALVIQDSNGENKIKML*

### VIII. Method of Continuous Evolution

[0569] Various aspects of the disclosure relate to providing directed evolution methods and systems (e.g., appropriate vectors, cells, phage, flow vessels, etc.) for making the evolved DddA variants described herein.

[0570] The directed evolution methods provided herein allow for a gene of interest (e.g., gene or sequence encoding a starter DddA protein described herein) in a viral vector to be evolved over multiple generations of viral life cycles in a flow of host cells to acquire a desired function or activity, i.e., an improved DddA variant with higher deaminase activity and/or broader sequence context.

[0571] Some aspects of this invention provide a method of continuous evolution of a gene of interest, comprising (a) contacting a population of host cells with a population of viral vectors comprising the gene of interest, wherein (1) the host cell is amenable to infection by the viral vector; (2) the host cell expresses viral genes required for the generation of viral particles; (3) the expression of at least one viral gene required for the production of an infectious viral particle is dependent on a function of the gene of interest; and (4) the viral vector allows for expression of the protein in the host cell, and can be replicated and packaged into a viral particle by the host cell. In some embodiments, the method comprises (b) contacting the host cells with a mutagen. In some embodiments, the method further comprises (c) incubating the population of host cells under conditions allowing for viral replication and the production of viral particles, wherein host cells are removed from the host cell population, and fresh, uninfected host cells are introduced into the population of host cells, thus replenishing the population of host cells and creating a flow of host cells. The cells are incubated in all embodiments under conditions allowing for the gene of interest to acquire a mutation. In some embodiments, the method further comprises (d) isolating a mutated version of the viral vector, encoding an evolved gene product (e.g., protein), from the population of host cells.

[0572] In some embodiments, a method of phage-assisted continuous evolution is provided comprising (a) contacting a population of bacterial host cells with a population of phages that comprise a gene of interest to be evolved and that are deficient in a gene required for the generation of infectious phage, wherein (1) the phage allows for expression of the gene of interest in the host cells; (2) the host cells are suitable host cells for phage infection, replication, and packaging; and (3) the host cells comprise an expression construct encoding the gene required for the generation of infectious phage, wherein expression of the gene is dependent on a function of a gene product of the gene of interest. In some embodiments the method further comprises (b) incubating the population of host cells under conditions allowing for the mutation of the gene of interest, the production of infectious phage, and the infection of host cells with phage, wherein infected cells are removed from the population of host cells, and wherein the population of host cells is replenished with fresh host cells that have not been infected by the phage. In some embodiments, the method further comprises (c) isolating a mutated phage replication product encoding an evolved protein from the population of host cells.

[0573] In some embodiments, the viral vector or the phage is a filamentous phage, for example, an M13 phage, such as an M13 selection phage as described in more detail elsewhere herein. In some such embodiments, the gene required for the production of infectious viral particles is the M13 gene III (gIII).

[0574] In some embodiments, the viral vector infects mammalian cells. In some embodiments, the viral vector is a retroviral vector. In some embodiments, the viral vector is a vesicular stomatitis virus (VSV) vector. As a dsRNA virus, VSV has a high mutation rate, and can carry cargo, including a gene of interest, of up to 4.5 kb in length. The generation of infectious VSV particles requires the envelope protein VSV-G, a viral glycoprotein that mediates phosphatidylserine attachment and cell entry. VSV can infect a broad spectrum of host cells, including mammalian and insect cells. VSV is therefore a highly suitable vector for continuous evolution in human, mouse, or insect host cells. Similarly, other retroviral vectors that can be pseudotyped with VSV-G envelope protein are equally suitable for continuous evolution processes as described herein.

[0575] It is known to those of skill in the art that many retroviral vectors, for example, Murine Leukemia Virus vectors, or Lentiviral vectors can efficiently be packaged with VSV-G envelope protein as a substitute for the virus's native envelope protein. In some embodiments, such VSV-G packagable vectors are adapted for use in a continuous evolution system in that the native envelope (env) protein (e.g., VSV-G in VSVS vectors, or env in MLV vectors) is deleted from the viral genome, and a gene of interest is inserted into the viral genome under the control of a promoter that is active in the desired host cells. The host cells, in turn, express the VSV-G protein, another env protein suitable for vector pseudotyping, or the viral vector's native env protein, under the control of a promoter the activity of which is dependent on an activity of a product encoded by the gene of interest, so that a viral vector with a mutation leadin G to T increased activity of the gene of interest will be packaged with higher efficiency than a vector with baseline or a loss-of-function mutation.

[0576] In some embodiments, mammalian host cells are subjected to infection by a continuously evolving population of viral vectors, for example, VSV vectors comprising a gene of interest and lacking the VSV-G encoding gene, wherein the host cells comprise a gene encoding the VSV-G protein under the control of a conditional promoter. Such retrovirus-bases system could be a two-vector system (the viral vector and an expression construct comprising a gene encoding the envelope protein), or, alternatively, a helper virus can be employed, for example, a VSV helper virus. A helper virus typically comprises a truncated viral genome deficient of structural elements required to package the genome into viral particles, but including viral genes encoding proteins required for viral genome processing in the host cell, and for the generation of viral particles. In such embodiments, the viral vector-based system could be a three-vector system (the viral vector, the expression construct comprising the envelope protein driven by a conditional promoter, and the helper virus comprising viral functions required for viral genome propagation but not the envelope protein). In some embodiments, expression of the five genes of the VSV genome from a helper virus or expression construct in the host cells, allows for production of infectious viral particles carrying a gene of interest, indicating that unbalanced gene expression permits viral replication at a reduced rate, suggesting that reduced expression of VSV-G would indeed serve as a limiting step in efficient viral production.

[0577] One advantage of using a helper virus is that the viral vector can be deficient in genes encoding proteins or other functions provided by the helper virus, and can, accordingly, carry a longer gene of interest. In some embodiments, the helper virus does not express an envelope protein, because expression of a viral envelope protein is known to reduce the infectability of host cells by some viral vectors via receptor interference. Viral vectors, for example retroviral vectors, suitable for continuous evolution processes, their respective envelope proteins, and helper viruses for such vectors, are well known to those of skill in the art. For an overview of some exemplary viral genomes, helper viruses, host cells, and envelope proteins suitable for continuous evolution procedures as described herein, see Coffin et al., Retroviruses, CSHL Press 1997, ISBN0-87969-571-4, incorporated herein in its entirety.

[0578] In some embodiments, the incubating of the host cells is for a time sufficient for at least 10, at least 20, at least 30, at least 40, at least 50, at least 100, at least 200, at least 300, at least 400, at least, 500, at least 600, at least 700, at least 800, at least 900, at least 1000, at least 1250, at least 1500, at least 1750, at least 2000, at least 2500, at least 3000, at least 4000, at least 5000, at least 7500, at least 10000, or more consecutive viral life cycles. In certain embodiments, the viral vector is an M13 phage, and the length of a single viral life cycle is about 10-20 minutes.

[0579] In some embodiments, the cells are contacted and/or incubated in suspension culture. For example, in some embodiments, bacterial cells are incubated in suspension culture in liquid culture media. Suitable culture media for bacterial suspension culture will be apparent to those of skill in the art, and the invention is not limited in this regard. See, for example, Molecular Cloning: A Laboratory Manual, 2nd Ed., ed. by Sambrook, Fritsch, and Maniatis (Cold Spring Harbor Laboratory Press: 1989); Elizabeth Kutter and Alexander Sulakvelidze: Bacteriophages: Biology and Applications. CRC Press; 1st edition (December 2004), ISBN: 0849313368; Martha R. J. Clokie and Andrew M. Kropinski: Bacteriophages: Methods and Protocols, Volume 1: Isolation, Characterization, and Interactions (Methods in Molecular Biology) Humana Press; 1st edition (December, 2008), ISBN: 1588296822; Martha R. J. Clokie and Andrew M. Kropinski: Bacteriophages: Methods and Protocols, Volume 2: Molecular and Applied Aspects (Methods in Molecular Biology) Humana Press; 1st edition (December 2008), ISBN: 1603275649; all of which are incorporated herein in their entirety by reference for disclosure of suitable culture media for bacterial host cell culture). Suspension culture typically requires the culture media to be agitated, either continuously or intermittently. This is achieved, in some embodiments, by agitating or stirring the vessel comprising the host cell population. In some embodiments, the outflow of host cells and the inflow of fresh host cells is sufficient to maintain the host cells in suspension. This in particular, if the flow rate of cells into and/or out of the lagoon is high.

[0580] In some embodiments, a viral vector/host cell combination is chosen in which the life cycle of the viral vector is significantly shorter than the average time between cell divisions of the host cell. Average cell division times and viral vector life cycle times are well known in the art for many cell types and vectors, allowing those of skill in the art to ascertain such host cell/vector combinations. In certain embodiments, host cells are being removed from the population of host cells contacted with the viral vector at a rate that results in the average time of a host cell remaining in the host cell population before being removed to be shorter than the average time between cell divisions of the host cells, but to be longer than the average life cycle of the viral vector employed. The result of this is that the host cells, on average, do not have sufficient time to proliferate during their time in the host cell population while the viral vectors do have sufficient time to infect a host cell, replicate in the host cell, and generate new viral particles during the time a host cell remains in the cell population. This assures that the only replicating nucleic acid in the host cell population is the viral vector, and that the host cell genome, the accessory plasmid, or any other nucleic acid constructs cannot acquire mutations allowing for escape from the selective pressure imposed.

[0581] For example, in some embodiments, the average time a host cell remains in the host cell population is about 10, about 11, about 12, about 13, about 14, about 15, about 16, about 17, about 18, about 19, about 20, about 21, about 22, about 23, about 24, about 25, about 30, about 35, about 40, about 45, about 50, about 55, about 60, about 70, about 80, about 90, about 100, about 120, about 150, or about 180 minutes.

[0582] In some embodiments, the average time a host cell remains in the host cell population depends on how fast the host cells divide and how long infection (or conjugation) requires. In general, the flow rate should be faster than the average time required for cell division, but slow enough to allow viral (or conjugative) propagation. The former will vary, for example, with the media type, and can be delayed by adding cell division inhibitor antibiotics (FtsZ inhibitors in E. coli, etc.). Since the limiting step in continuous evolution is production of the protein required for gene transfer from cell to cell, the flow rate at which the vector washes out will depend on the current activity of the gene(s) of interest. In some embodiments, titratable production of the protein required for the generation of infectious particles, as described herein, can mitigate this problem. In some embodiments, an indicator of phage infection allows computer-controlled optimization of the flow rate for the current activity level in real-time.

[0583] In various embodiments, the continuous evolution process is PACE, which is described in Thuronyi, B. W. et al. Nat Biotechnol 37, 1070-1079 (2019), the contents of which are incorporated herein by reference in their entirety. The general concept of PACE technology has also been described, for example, in International PCT Application, PCT/US2009/056194, filed Sep. 8, 2009, published as WO 2010/028347 on Mar. 11, 2010; International PCT Application, PCT/US2011/066747, filed Dec. 22, 2011, published as WO 2012/088381 on Jun. 28, 2012; U.S. Application, U.S. Pat. No. 9,023,594, issued May 5, 2015, International PCT Application, PCT/US2015/012022, filed Jan. 20, 2015, published as WO 2015/134121 on Sep. 11, 2015, and International PCT Application, PCT/US2016/027795, filed Apr. 15, 2016, published as WO 2016/168631 on Oct. 20, 2016, the entire contents of each of which are incorporated herein by reference. PACE can be used, for instance, to evolve a deaminase (e.g., a cytidine or adenosine deaminase) which uses single strand DNA as a substrate to obtain a deaminase which is capable of using double-strand DNA as a substrate (e.g., DddA).

### IX. Methods of Treatment

[0584] The evolved DddA-containing base editors may be used to deaminate a target base in a double stranded DNA substrate.

[0585] The instant disclosure provides methods for the treatment of a subject diagnosed with a disease associated with or caused by a point mutation that can be corrected by the mtDNA editing system provided herein (e.g., deamination of mitochondrial DNA by a fusion protein or multiple fusion proteins). For example, in some embodiments, a method is provided that comprises administering to a subject having such a disease (e.g., MELAS/Leigh syndrome and Leber's hereditary optic neuropathy, other disorders associated with a point mutation as described above), an effective amount of the mtDNA editing system provided herein (e.g., deamination of mitochondrial DNA by a fusion protein or multiple fusion proteins) described herein that corrects the point mutation or introduces a point mutation comprising desired genetic change. In some embodiments, a method is provided that comprises administering to a subject having such a disease, (e.g., MELAS/Leigh syndrome and Leber's hereditary optic neuropathy, other disorders associated with a point mutation as described above), an effective amount of the mtDNA editing system provided herein (e.g., deamination of mitochondrial DNA by a fusion protein or multiple fusion proteins) described herein that corrects the point mutation or introduces a deactivating mutation into a disease-associated gene. In some embodiments, the disease is a proliferative disease. In some embodiments, the disease is a genetic disease. In some embodiments, the disease is a mitochondrial disease. In some embodiments, the disease is a metabolic disease. In some embodiments, the disease is a lysosomal storage disease. Other diseases that can be treated by correcting a point mutation or introducing a deactivating mutation into a disease-associated gene will be known to those of skill in the art, and the disclosure is not limited in this respect.

[0586] The instant disclosure provides methods for the treatment of additional diseases or disorders (e.g., diseases or disorders that are associated with or caused by a point mutation that can be corrected by the mtDNA editing system provided herein (e.g., deamination of mitochondrial DNA by a fusion protein or multiple fusion proteins) provided herein). Some such diseases are described herein, and additional suitable diseases that can be treated with the strategies and fusion proteins, or nucleic acids thereof, provided herein will be apparent to those of skill in the art based on the instant disclosure. Exemplary suitable diseases and disorders are listed below. It will be understood that the numbering of the specific positions or residues in the respective sequences depends on the particular protein and numbering scheme used. Numbering might be different (e.g., in precursors of a mature protein and the mature protein itself), and differences in sequences from species to species may affect numbering. One of skill in the art will be able to identify the respective residue in any homologous protein and in the respective encoding nucleic acid by methods well known in the art (e.g., by sequence alignment and determination of homologous residues). Exemplary suitable diseases and disorders include, without limitation: MELAS/Leigh syndrome and Leber's hereditary optic neuropathy.

[0587] The Evolved DddA-containing base editors described herein may be used to treat any mitochondrial disease or disorder. As used herein, “mitochondrial disorders” related to disorders which are due to abnormal mitochondria such as for example, a mitochondrial genetic mutation, enzyme pathways etc. Examples of disorders include and are not limited to: loss of motor control, muscle weakness and pain, gastro-intestinal disorders and swallowing difficulties, poor growth, cardiac disease, liver disease, diabetes, respiratory complications, seizures, visual/hearing problems, lactic acidosis, developmental delays and susceptibility to infection.

[0588] The mitochondrial abnormalities give rise to “mitochondrial diseases” which include, but not limited to: AD: Alzheimer's Disease; ADPD: Alzheimer's Disease and Parkinsons's Disease; AMDF: Ataxia, Myoclonus and Deafness CIPO: Chronic Intestinal Pseudoobstruction with myopathy and Opthalmoplegia; CPEO: Chronic Progressive External Opthalmoplegia; DEAF: Maternally inherited DEAFness or aminoglycoside-induced DEAFness; DEMCHO: Dementia and Chorea; DMDF: Diabetes Mellitus & DeaFness; Exercise Intolerance; ESOC: Epilepsy, Strokes, Optic atrophy, & Cognitive decline; FBSN: Familial Bilateral Striatal Necrosis; FICP: Fatal Infantile Cardiomyopathy Plus, a MELAS-associated cardiomyopathy; GER: Gastrointestinal Reflux; KSS Kearns Sayre Syndrome LDYT: Leber's hereditary optic neuropathy and DYsTonia; LHON: Leber Hereditary Optic Neuropathy; LFMM: Lethal Infantile Mitochondrial Myopathy; MDM: Myopathy and Diabetes Mellitus; MELAS:

[0589] Mitochondrial Encephalomyopathy, Lactic Acidosis, and Stroke-like episodes; MEPR: Myoclonic Epilepsy and Psychomotor Regression; MERME: MERRF/MELAS overlap disease; MERRF: Myoclonic Epilepsy and Ragged Red Muscle Fibers; MHCM: Maternally Inherited Hypertrophic CardioMyopathy; MICM: Maternally Inherited Cardiomyopathy; MILS: Maternally Inherited Leigh Syndrome; Mitochondrial Encephalocardiomyopathy; Mitochondrial Encephalomyopathy; MM: Mitochondrial Myopathy; MMC: Maternal Myopathy and Cardiomyopathy; Multisystem Mitochondrial Disorder (myopathy, encephalopathy, blindness, hearing loss, peripheral neuropathy); NARP: Neurogenic muscle weakness, Ataxia, and Retinitis Pigmentosa; alternate phenotype at this locus is reported as Leigh Disease; NIDDM: Non-Insulin Dependent Diabetes Mellitus; PEM: Progressive Encephalopathy; PME: Progressive Myoclonus Epilepsy; RTT: Rett Syndrome; SIDS: Sudden Infant Death Syndrome.

[0590] In embodiments, a mitochondrial disorder that may be treatable using the Evolved DddA-containing base editors described herein include Myoclonic Epilepsy with Ragged Red Fibers (MERRF); Mitochondrial Myopathy, Encephalopathy, Lactacidosis, and Stroke (MELAS); Maternally Inherited Diabetes and Deafness (MIDD); Leber's Hereditary Optic Neuropathy (LHON); chronic progressive external ophthalmoplegia (CPEO); Leigh Disease; Kearns-Sayre Syndrome (KSS); Friedreich's Ataxia (FRDA); Co-Enzyme QIO (CoQIO) Deficiency; Complex I Deficiency; Complex II Deficiency; Complex III Deficiency; Complex IV Deficiency; Complex V Deficiency; other myopathies; cardiomyopathy; encephalomyopathy; renal tubular acidosis; neurodegenerative diseases; Parkinson's disease; Alzheimer's disease; amyotrophic lateral sclerosis (ALS); motor neuron diseases; hearing and balance impairments; or other neurological disorders; epilepsy; genetic diseases; Huntington's Disease; mood disorders; nucleoside reverse transcriptase inhibitors (NRTI) treatment; HIV-associated neuropathy; schizophrenia; bipolar disorder; age-associated diseases; cerebral vascular diseases; macular degeneration; diabetes; and cancer.

### X. Pharmaceutical Compositions

[0591] Other aspects of the present disclosure relate to pharmaceutical compositions comprising any of the various components of the mtDNA editing system provided herein (e.g., deamination of mitochondrial DNA by a fusion protein or multiple fusion proteins) described herein (e.g., including, but not limited to, the mitoTALE, DddA, or portions thereof, and fusion proteins (e.g., comprising mitoTALE and portion of DddA)).

[0592] The term “pharmaceutical composition”, as used herein, refers to a composition formulated for pharmaceutical use. In some embodiments, the pharmaceutical composition further comprises a pharmaceutically acceptable carrier. In some embodiments, the pharmaceutical composition comprises additional agents (e.g. for specific delivery, increasing half-life, or other therapeutic compounds).

[0593] As used here, the term “pharmaceutically-acceptable carrier” means a pharmaceutically-acceptable material, composition or vehicle, such as a liquid or solid filler, diluent, excipient, manufacturing aid (e.g., lubricant, talc magnesium, calcium or zinc stearate, or steric acid), or solvent encapsulating material, involved in carrying or transporting the compound from one site (e.g., the delivery site) of the body, to another site (e.g., organ, tissue or portion of the body). A pharmaceutically acceptable carrier is “acceptable” in the sense of being compatible with the other ingredients of the formulation and not injurious to the tissue of the subject (e.g., physiologically compatible, sterile, physiologic pH, etc.). Some examples of materials which can serve as pharmaceutically-acceptable carriers include: (1) sugars, such as lactose, glucose and sucrose; (2) starches, such as corn starch and potato starch; (3) cellulose, and its derivatives, such as sodium carboxymethyl cellulose, methylcellulose, ethyl cellulose, microcrystalline cellulose and cellulose acetate; (4) powdered tragacanth; (5) malt; (6) gelatin; (7) lubricating agents, such as magnesium stearate, sodium lauryl sulfate and talc; (8) excipients, such as cocoa butter and suppository waxes; (9) oils, such as peanut oil, cottonseed oil, safflower oil, sesame oil, olive oil, corn oil and soybean oil; (10) glycols, such as propylene glycol; (11) polyols, such as glycerin, sorbitol, mannitol and polyethylene glycol (PEG); (12) esters, such as ethyl oleate and ethyl laurate; (13) agar; (14) buffering agents, such as magnesium hydroxide and aluminum hydroxide; (15) alginic acid; (16) pyrogen-free water; (17) isotonic saline; (18) Ringer's solution; (19) ethyl alcohol; (20) pH buffered solutions; (21) polyesters, polycarbonates and/or polyanhydrides; (22) bulking agents, such as polypeptides and amino acids (23) serum component, such as serum albumin, HDL and LDL; (22) C2-C12 alcohols, such as ethanol; and (23) other non-toxic compatible substances employed in pharmaceutical formulations. Wetting agents, coloring agents, release agents, coating agents, sweetening agents, flavoring agents, perfuming agents, preservative and antioxidants can also be present in the formulation. The terms such as “excipient”, “carrier”, “pharmaceutically acceptable carrier” or the like are used interchangeably herein.

[0594] In some embodiments, the pharmaceutical composition is formulated for delivery to a subject (e.g., for nucleic acid editing). Suitable routes of administrating the pharmaceutical composition described herein include, without limitation: topical, subcutaneous, transdermal, intradermal, intralesional, intraarticular, intraperitoneal, intravesical, transmucosal, gingival, intradental, intracochlear, transtympanic, intraorgan, epidural, intrathecal, intramuscular, intravenous, intravascular, intraosseus, periocular, intratumoral, intracerebral, and intracerebroventricular administration.

[0595] In some embodiments, the pharmaceutical composition is formulated in accordance with routine procedures as a composition adapted for intravenous or subcutaneous administration to a subject (e.g., a human). In some embodiments, pharmaceutical composition for administration by injection are solutions in sterile isotonic aqueous buffer. Where necessary, the pharmaceutical can also include a solubilizing agent and a local anesthetic such as lidocaine to ease pain at the site of the injection. Generally, the ingredients are supplied either separately or mixed together in unit dosage form, for example, as a dry lyophilized powder or water free concentrate in a hermetically sealed container such as an ampoule or sachette indicating the quantity of active agent. Where the pharmaceutical is to be administered by infusion, it can be dispensed with an infusion bottle containing sterile pharmaceutical grade water or saline. Where the pharmaceutical composition is administered by injection, an ampoule of sterile water for injection or saline can be provided so that the ingredients can be mixed prior to administration.

[0596] A pharmaceutical composition for systemic administration may be a liquid (e.g., sterile saline, lactated Ringer's or Hank's solution). In addition, the pharmaceutical composition can be in solid forms and re-dissolved or suspended immediately prior to use. Lyophilized forms are also contemplated.

[0597] The pharmaceutical composition can be contained within a lipid particle or vesicle, such as a liposome or microcrystal, which is also suitable for parenteral administration. The particles can be of any suitable structure, such as unilamellar or plurilamellar, so long as compositions are contained therein. Compounds can be entrapped in “stabilized plasmid-lipid particles” (SPLP) containing the fusogenic lipid dioleoylphosphatidylethanolamine (DOPE), low levels (5-10 mol %) of cationic lipid, and stabilized by a polyethyleneglycol (PEG) coating (Zhang Y. P. et al., Gene Ther. 1999, 6:1438-47). Positively charged lipids such as N-[1-(2,3-dioleoyloxi)propyl]-N,N,N-trimethyl-amoniummethylsulfate, or “DOTAP,” are particularly preferred for such particles and vesicles. The preparation of such lipid particles is well known. See, e.g., U.S. Pat. Nos. 4,880,635; 4,906,477; 4,911,928; 4,917,951; 4,920,016; and 4,921,757; each of which is incorporated herein by reference.

[0598] The pharmaceutical composition described herein may be administered or packaged as a unit dose, for example. The term “unit dose” when used in reference to a pharmaceutical composition of the present disclosure refers to physically discrete units suitable as unitary dosage for the subject, each unit containing a predetermined quantity of active material calculated to produce the desired therapeutic effect in association with the required diluent; i.e., carrier, or vehicle.

[0599] Further, the pharmaceutical composition can be provided as a pharmaceutical kit comprising: (a) a container containing a compound of the invention in lyophilized form; and (b) a second container containing a pharmaceutically acceptable diluent (e.g., sterile water) for injection. The pharmaceutically acceptable diluent can be used for reconstitution or dilution of the lyophilized compound of the invention. Optionally associated with such container(s) can be a notice in the form prescribed by a governmental agency regulating the manufacture, use, or sale of pharmaceuticals or biological products, which notice reflects approval by the agency of manufacture, use or sale for human administration.

[0600] In another aspect, an article of manufacture containing materials useful for the treatment of the diseases described above is included. In some embodiments, the article of manufacture comprises a container and a label. Suitable containers include, for example, bottles, vials, syringes, and test tubes. The containers may be formed from a variety of materials such as glass or plastic. In some embodiments, the container holds a composition that is effective for treating a disease described herein and may have a sterile access port. For example, the container may be an intravenous solution bag or a vial having a stopper pierceable by a hypodermic injection needle. The active agent in the composition is a compound of the invention. In some embodiments, the label on or associated with the container indicates that the composition is used for treating the disease of choice. The article of manufacture may further comprise a second container comprising a pharmaceutically acceptable buffer, such as phosphate-buffered saline, Ringer's solution, or dextrose solution. It may further include other materials desirable from a commercial and user standpoint, including other buffers, diluents, filters, needles, syringes, and package inserts with instructions for use.

### XI. Delivery Methods

[0601] In another aspect, the present disclosure provides for the delivery of Evolved DddA-containing base editors in vitro and in vivo using various strategies, including on separate vectors using split inteins and as well as direct delivery strategies of the ribonucleoprotein complex (i.e., the base editor complexed to the gRNA and/or the second-site gRNA) using techniques such as electroporation, use of cationic lipid-mediated formulations, and induced endocytosis methods using receptor ligands fused to the ribonucleoprotein complexes. In addition, mRNA delivery methods may also be employed. Any such methods are contemplated herein. The mtDNA BE fusion proteins, or components thereof, preferably be modified with an MTS or other signal sequence that facilitates entry of the polypeptides and the guide RNAs (in the case where a pDNAbp is Cas9) into the mitochondria.

[0602] In some aspects, the invention provides methods comprising delivering one or more base editor-encoding and/or gRNA-encoding polynucleotides, such as or one or more vectors as described herein encoding one or more components described herein, one or more transcripts thereof, and/or one or proteins transcribed therefrom, to a host cell. In some aspects, the invention further provides cells produced by such methods, and organisms (such as animals, plants, or fungi) comprising or produced from such cells. In some embodiments, a base editor as described herein in combination with (and optionally complexed with) a guide sequence is delivered to a cell. Conventional viral and non-viral based gene transfer methods can be used to introduce nucleic acids in mammalian cells or target tissues. Such methods can be used to administer nucleic acids encoding components of a base editor to cells in culture, or in a host organism. Non-viral vector delivery systems include DNA plasmids, RNA (e.g. a transcript of a vector described herein), naked nucleic acid, and nucleic acid complexed with a delivery vehicle, such as a liposome. Viral vector delivery systems include DNA and RNA viruses, which have either episomal or integrated genomes after delivery to the cell. For a review of gene therapy procedures, see Anderson, Science 256:808-813 (1992); Nabel & Felgner, TIBTECH 11:211-217 (1993); Mitani & Caskey, TIBTECH 11:162-166 (1993); Dillon, TIBTECH 11:167-175 (1993); Miller, Nature 357:455-460 (1992); Van Brunt, Biotechnology 6(10):1149-1154 (1988); Vigne, Restorative Neurology and Neuroscience 8:35-36 (1995); Kremer & Perricaudet, British Medical Bulletin 51(1):31-44 (1995); Haddada et al., in Current Topics in Microbiology and Immunology Doerfler and Bihm (eds) (1995); and Yu et al., Gene Therapy 1:13-26 (1994).

[0603] Methods of non-viral delivery of nucleic acids include lipofection, nucleofection, microinjection, biolistics, virosomes, liposomes, immunoliposomes, polycation or lipid:nucleic acid conjugates, naked DNA, artificial virions, and agent-enhanced uptake of DNA. Lipofection is described in e.g., U.S. Pat. Nos. 5,049,386, 4,946,787; and 4,897,355) and lipofection reagents are sold commercially (e.g., Transfectam™ and Lipofectin™). Cationic and neutral lipids that are suitable for efficient receptor-recognition lipofection of polynucleotides include those of Feigner, WO 91/17424; WO 91/16024. Delivery can be to cells (e.g. in vitro or ex vivo administration) or target tissues (e.g. in vivo administration). The preparation of lipid:nucleic acid complexes, including targeted liposomes such as immunolipid complexes, is well known to one of skill in the art (see, e.g., Crystal, Science 270:404-410 (1995); Blaese et al., Cancer Gene Ther. 2:291-297 (1995); Behr et al., Bioconjugate Chem. 5:382-389 (1994); Remy et al., Bioconjugate Chem. 5:647-654 (1994); Gao et al., Gene Therapy 2:710-722 (1995); Ahmad et al., Cancer Res. 52:4817-4820 (1992); U.S. Pat. Nos. 4,186,183, 4,217,344, 4,235,871, 4,261,975, 4,485,054, 4,501,728, 4,774,085, 4,837,028, and 4,946,787).

[0604] The use of RNA or DNA viral based systems for the delivery of nucleic acids take advantage of highly evolved processes for targeting a virus to specific cells in the body and trafficking the viral payload to the nucleus. Viral vectors can be administered directly to patients (in vivo) or they can be used to treat cells in vitro, and the modified cells may optionally be administered to patients (ex vivo). Conventional viral based systems could include retroviral, lentivirus, adenoviral, adeno-associated and herpes simplex virus vectors for gene transfer. Integration in the host genome is possible with the retrovirus, lentivirus, and adeno-associated virus gene transfer methods, often resulting in long term expression of the inserted transgene. Additionally, high transduction efficiencies have been observed in many different cell types and target tissues.

[0605] The tropism of a viruses can be altered by incorporating foreign envelope proteins, expanding the potential target population of target cells. Lentiviral vectors are retroviral vectors that are able to transduce or infect non-dividing cells and typically produce high viral titers. Selection of a retroviral gene transfer system would therefore depend on the target tissue. Retroviral vectors are comprised of cis-acting long terminal repeats with packaging capacity for up to 6-10 kb of foreign sequence. The minimum cis-acting LTRs are sufficient for replication and packaging of the vectors, which are then used to integrate the therapeutic gene into the target cell to provide permanent transgene expression. Widely used retroviral vectors include those based upon murine leukemia virus (MuLV), gibbon ape leukemia virus (GaLV), Simian Immuno deficiency virus (SIV), human immuno deficiency virus (HIV), and combinations thereof (see, e.g., Buchscher et al., J. Virol. 66:2731-2739 (1992); Johann et al., J. Virol. 66:1635-1640 (1992); Sommnerfelt et al., Virol. 176:58-59 (1990); Wilson et al., J. Virol. 63:2374-2378 (1989); Miller et al., J. Virol. 65:2220-2224 (1991); PCT/US94/05700). In applications where transient expression is preferred, adenoviral based systems may be used. Adenoviral based vectors are capable of very high transduction efficiency in many cell types and do not require cell division. With such vectors, high titer and levels of expression have been obtained. This vector can be produced in large quantities in a relatively simple system. Adeno-associated virus (“AAV”) vectors may also be used to transduce cells with target nucleic acids, e.g., in the in vitro production of nucleic acids and peptides, and for in vivo and ex vivo gene therapy procedures (see, e.g., West et al., Virology 160:38-47 (1987); U.S. Pat. No. 4,797,368; WO 93/24641; Kotin, Human Gene Therapy 5:793-801 (1994); Muzyczka, J. Clin. Invest. 94:1351 (1994). Construction of recombinant AAV vectors are described in a number of publications, including U.S. Pat. No. 5,173,414; Tratschin et al., Mol. Cell. Biol. 5:3251-3260 (1985); Tratschin, et al., Mol. Cell. Biol. 4:2072-2081 (1984); Hermonat & Muzyczka, PNAS 81:6466-6470 (1984); and Samulski et al., J. Virol. 63:03822-3828 (1989).

[0606] Packaging cells are typically used to form virus particles that are capable of infecting a host cell. Such cells include 293 cells, which package adenovirus, and ψ2 cells or PA317 cells, which package retrovirus. Viral vectors used in gene therapy are usually generated by producing a cell line that packages a nucleic acid vector into a viral particle. The vectors typically contain the minimal viral sequences required for packaging and subsequent integration into a host, other viral sequences being replaced by an expression cassette for the polynucleotide(s) to be expressed. The missing viral functions are typically supplied in trans by the packaging cell line. For example, AAV vectors used in gene therapy typically only possess ITR sequences from the AAV genome which are required for packaging and integration into the host genome. Viral DNA is packaged in a cell line, which contains a helper plasmid encoding the other AAV genes, namely rep and cap, but lacking ITR sequences. The cell line may also be infected with adenovirus as a helper. The helper virus promotes replication of the AAV vector and expression of AAV genes from the helper plasmid. The helper plasmid is not packaged in significant amounts due to a lack of ITR sequences. Contamination with adenovirus can be reduced by, e.g., heat treatment to which adenovirus is more sensitive than AAV. Additional methods for the delivery of nucleic acids to cells are known to those skilled in the art. See, for example, US20030087817, incorporated herein by reference.

[0607] In various embodiments, the base editor constructs (including, the split-constructs) may be engineered for delivery in one or more rAAV vectors. An rAAV as related to any of the methods and compositions provided herein may be of any serotype including any derivative or pseudotype (e.g., 1, 2, 3, 4, 5, 6, 7, 8, 9, 10, 11, 12, 13, 2/1, 2/5, 2/8, 2/9, 3/1, 3/5, 3/8, or 3/9). An rAAV may comprise a genetic load (i.e., a recombinant nucleic acid vector that expresses a gene of interest, such as a whole or split base editor fusion protein that is carried by the rAAV into a cell) that is to be delivered to a cell. An rAAV may be chimeric.

[0608] As used herein, the serotype of an rAAV refers to the serotype of the capsid proteins of the recombinant virus. Non-limiting examples of derivatives and pseudotypes include rAAV2/1, rAAV2/5, rAAV2/8, rAAV2/9, AAV2-AAV3 hybrid, AAVrh.10, AAVhu.14, AAV3a/3b, AAVrh32.33, AAV-HSC15, AAV-HSC17, AAVhu.37, AAVrh.8, CHt-P6, AAV2.5, AAV6.2, AAV2i8, AAV-HSC15/17, AAVM41, AAV9.45, AAV6(Y445F/Y731F), AAV2.5T, AAV-HAE1/2, AAV clone 32/83, AAVShH10, AAV2 (Y->F), AAV8 (Y733F), AAV2.15, AAV2.4, AAVM41, and AAVr3.45. A non-limiting example of derivatives and pseudotypes that have chimeric VP1 proteins is rAAV2/5-1VP1u, which has the genome of AAV2, capsid backbone of AAV5 and VP1u of AAV1. Other non-limiting example of derivatives and pseudotypes that have chimeric VP1 proteins are rAAV2/5-8VP1u, rAAV2/9-1VP1u, and rAAV2/9-8VP1u.

[0609] AAV derivatives/pseudotypes, and methods of producing such derivatives/pseudotypes are known in the art (see, e.g., Mol Ther. 2012 April; 20(4):699-708. doi: 10.1038/mt.2011.287. Epub 2012 Jan. 24. The AAV vector toolkit: poised at the clinical crossroads. Asokan A1, Schaffer D V, Samulski R J.). Methods for producing and using pseudotyped rAAV vectors are known in the art (see, e.g., Duan et al., J. Virol., 75:7662-7671, 2001; Halbert et al., J. Virol., 74:1524-1532, 2000; Zolotukhin et al., Methods, 28:158-167, 2002; and Auricchio et al., Hum. Molec. Genet., 10:3075-3081, 2001).

[0610] Methods of making or packaging rAAV particles are known in the art and reagents are commercially available (see, e.g., Zolotukhin et al. Production and purification of serotype 1, 2, and 5 recombinant adeno-associated viral vectors. Methods 28 (2002) 158-167; and U.S. Patent Publication Numbers US20070015238 and US20120322861, which are incorporated herein by reference; and plasmids and kits available from ATCC and Cell Biolabs, Inc.). For example, a plasmid comprising a gene of interest may be combined with one or more helper plasmids, e.g., that contain a rep gene (e.g., encoding Rep78, Rep68, Rep52 and Rep40) and a cap gene (encoding VP1, VP2, and VP3, including a modified VP2 region as described herein), and transfected into a recombinant cells such that the rAAV particle can be packaged and subsequently purified.

[0611] Recombinant AAV may comprise a nucleic acid vector, which may comprise at a minimum: (a) one or more heterologous nucleic acid regions comprising a sequence encoding a protein or polypeptide of interest or an RNA of interest (e.g., a siRNA or microRNA), and (b) one or more regions comprising inverted terminal repeat (ITR) sequences (e.g., wild-type ITR sequences or engineered ITR sequences) flanking the one or more nucleic acid regions (e.g., heterologous nucleic acid regions). Herein, heterologous nucleic acid regions comprising a sequence encoding a protein of interest or RNA of interest are referred to as genes of interest.

[0612] Any one of the rAAV particles provided herein may have capsid proteins that have amino acids of different serotypes outside of the VP1u region. In some embodiments, the serotype of the backbone of the VP1 protein is different from the serotype of the ITRs and/or the Rep gene. In some embodiments, the serotype of the backbone of the VP1 capsid protein of a particle is the same as the serotype of the ITRs. In some embodiments, the serotype of the backbone of the VP1 capsid protein of a particle is the same as the serotype of the Rep gene. In some embodiments, capsid proteins of rAAV particles comprise amino acid mutations that result in improved transduction efficiency.

[0613] In some embodiments, the nucleic acid vector comprises one or more regions comprising a sequence that facilitates expression of the nucleic acid (e.g., the heterologous nucleic acid), e.g., expression control sequences operatively linked to the nucleic acid. Numerous such sequences are known in the art. Non-limiting examples of expression control sequences include promoters, insulators, silencers, response elements, introns, enhancers, initiation sites, termination signals, and poly(A) tails. Any combination of such control sequences is contemplated herein (e.g., a promoter and an enhancer).

[0614] Final AAV constructs may incorporate a sequence encoding the gRNA. In other embodiments, the AAV constructs may incorporate a sequence encoding the second-site nicking guide RNA. In still other embodiments, the AAV constructs may incorporate a sequence encoding the second-site nicking guide RNA and a sequence encoding the gRNA.

[0615] In various embodiments, the gRNAs can be expressed from an appropriate promoter, such as a human U6 (hU6) promoter, a mouse U6 (mU6) promoter, or other appropriate promoter. The gRNAs (if multiple) can be driven by the same promoters or different promoters.

[0616] In some embodiments, a rAAV constructs or the herein compositions are administered to a subject enterally. In some embodiments, a rAAV constructs or the herein compositions are administered to the subject parenterally. In some embodiments, a rAAV particle or the herein compositions are administered to a subject subcutaneously, intraocularly, intravitreally, subretinally, intravenously (IV), intracerebro-ventricularly, intramuscularly, intrathecally (IT), intracisternally, intraperitoneally, via inhalation, topically, or by direct injection to one or more cells, tissues, or organs. In some embodiments, a rAAV particle or the herein compositions are administered to the subject by injection into the hepatic artery or portal vein.

[0617] In other aspects, the base editors can be divided at a split site and provided as two halves of a whole/complete base editor. The two halves can be delivered to cells (e.g., as expressed proteins or on separate expression vectors) and once in contact inside the cell, the two halves form the complete base editor through the self-splicing action of the inteins on each base editor half. Split intein sequences can be engineered into each of the halves of the encoded base editor to facilitate their transplicing inside the cell and the concomitant restoration of the complete, functioning base editor.

[0618] These split intein-based methods overcome several barriers to in vivo delivery. For example, the DNA encoding base editors is larger than the rAAV packaging limit, and so requires special solutions. One such solution is formulating the editor fused to split intein pairs that are packaged into two separate rAAV particles that, when co-delivered to a cell, reconstitute the functional editor protein.

[0619] In this aspect, the base editors can be divided at a split site and provided as two halves of a whole/complete base editor. The two halves can be delivered to cells (e.g., as expressed proteins or on separate expression vectors) and once in contact inside the cell, the two halves form the complete base editor through the self-splicing action of the inteins on each base editor half. Split intein sequences can be engineered into each of the halves of the encoded base editor to facilitate their transplicing inside the cell and the concomitant restoration of the complete, functioning base editor.

[0620] In various embodiments, the base editors may be engineered as two half proteins (i.e., a ABE N-terminal half and a CBE C-terminal half) by “splitting” the whole base editor as a “split site.” The “split site” refers to the location of insertion of split intein sequences (i.e., the N intein and the C intein) between two adjacent amino acid residues in the base editor. More specifically, the “split site” refers to the location of dividing the whole base editor into two separate halves, wherein in each halve is fused at the split site to either the N intein or the C intein motifs. The split site can be at any suitable location in the base editor fusion protein, but preferably the split site is located at a position that allows for the formation of two half proteins which are appropriately sized for delivery (e.g., by expression vector) and wherein the inteins, which are fused to each half protein at the split site termini, are available to sufficiently interact with one another when one half protein contacts the other half protein inside the cell.

[0621] In some embodiments, the split site is located in the pDNAbp domain. In other embodiments, the split site is located in the double stranded deaminase domain (DddA). In other embodiments, the split site is located in a linker that joins the napDNAbp domain and the deaminase domain. Preferably, the DddA is split so as to inactive the deaminase activity until the split fragments are co-localized in the mitochondria at the target site.

[0622] In various embodiments, split site design requires finding sites to split and insert an N- and C-terminal intein that are both structurally permissive for purposes of packaging the two half base editor domains into two different AAV genomes. Additionally, intein residues necessary for trans splicing can be incorporated by mutating residues at the N terminus of the C terminal extein or inserting residues that will leave an intein “scar.”

[0623] In various embodiments, using SpCas9 nickase as an example, the split can be between any two amino acids between 1 and 1368 of SEQ ID NO: 59. Preferred splits, however, will be located between the central region of the protein, e.g., from amino acids 50-1250, or from 100-1200, or from 150-1150, or from 200-1100, or from 250-1050, or from 300-1000, or from 350-950, or from 400-900, or from 450-850, or from 500-800, or from 550-750, or from 600-700 of SEQ ID NO: 59. In specific exemplary embodiments, the split site may be between 740/741, or 801/802, or 1010/1011, or 1041/1042. In other embodiments the split site may be between 1/2, 2/3, 3/4, 4/5, 5/6, 6/7, 7/8, 8/9, 9/10, 10/11, 12/13, 14/15, 15/16, 17/18, 19/20 . . . 50/51 . . . 100/101 . . . 200/201 . . . 300/301 . . . 400/401 . . . 500/501 . . . 600/601 . . . 700/701 . . . 800/801 . . . 900/901 . . . 1000/1001 . . . 1100/1101 . . . 1200/1201 . . . 1300/1301 . . . and 1367/1368, including all adjacent pairs of amino acid residues.

[0624] In various embodiments, the split inteins can be used to separately deliver separate portions of a complete Base editor fusion protein to a cell, which upon expression in a cell, become reconstituted as a complete Base editor fusion protein through the trans splicing.

[0625] In some embodiments, the disclosure provides a method of delivering a Base editor fusion protein to a cell, comprising: constructing a first expression vector encoding an N-terminal fragment of the Base editor fusion protein fused to a first split intein sequence; constructing a second expression vector encoding a C-terminal fragment of the Base editor fusion protein fused to a second split intein sequence; delivering the first and second expression vectors to a cell, wherein the N-terminal and C-terminal fragment are reconstituted as the Base editor fusion protein in the cell as a result of trans splicing activity causing self-excision of the first and second split intein sequences.

[0626] In other embodiments, the split site is in the napDNAbp domain.

[0627] In still other embodiments, the split site is in the deaminase domain.

[0628] In yet other embodiments, the split site is in the linker.

[0629] In other embodiments, the base editors may be delivered by ribonucleoprotein complexes.

[0630] In this aspect, the base editors may be delivered by non-viral delivery strategies involving delivery of a base editor complexed with a gRNA (i.e., a ABE ribonucleoprotein complex) by various methods, including electroporation and lipid nanoparticles. Methods of non-viral delivery of nucleic acids include lipofection, nucleofection, microinjection, biolistics, virosomes, liposomes, immunoliposomes, polycation or lipid:nucleic acid conjugates, naked DNA, artificial virions, and agent-enhanced uptake of DNA. Lipofection is described in e.g., U.S. Pat. Nos. 5,049,386, 4,946,787; and 4,897,355) and lipofection reagents are sold commercially (e.g., Transfectam™ and Lipofectin™). Cationic and neutral lipids that are suitable for efficient receptor-recognition lipofection of polynucleotides include those of Feigner, WO 91/17424; WO 91/16024. Delivery can be to cells (e.g. in vitro or ex vivo administration) or target tissues (e.g. in vivo administration).

[0631] The preparation of lipid:nucleic acid complexes, including targeted liposomes such as immunolipid complexes, is well known to one of skill in the art (see, e.g., Crystal, Science 270:404-410 (1995); Blaese et al., Cancer Gene Ther. 2:291-297 (1995); Behr et al., Bioconjugate Chem. 5:382-389 (1994); Remy et al., Bioconjugate Chem. 5:647-654 (1994); Gao et al., Gene Therapy 2:710-722 (1995); Ahmad et al., Cancer Res. 52:4817-4820 (1992); U.S. Pat. Nos. 4,186,183, 4,217,344, 4,235,871, 4,261,975, 4,485,054, 4,501,728, 4,774,085, 4,837,028, and 4,946,787).

### XII. Kits, Vectors, Cells

[0632] Some aspects of this disclosure provide kits comprising a fusion protein or a nucleic acid construct comprising a nucleotide sequence encoding the various components (e.g., fusion protein) of the mtDNA editing system provided herein (e.g., deamination of mitochondrial DNA by a fusion protein or multiple fusion proteins) described herein (e.g., including, but not limited to, the mitoTALE-DddA fusion proteins, vectors or cells comprising the same). In some embodiments, the nucleotide sequence comprises a heterologous promoter that drives expression of the fusion protein editing system components described herein.

[0633] Some aspects of this disclosure provide kits comprising one or more fusion proteins or nucleic acid constructs encoding the various components of the mtDNA editing system provided herein (e.g., deamination of mitochondrial DNA by a fusion protein or multiple fusion proteins) described herein, e.g., the comprising a nucleotide sequence encoding the components of the mtDNA editing system provided herein (e.g., deamination of mitochondrial DNA by a fusion protein or multiple fusion proteins) capable of modifying a target DNA sequence. In some embodiments, the nucleotide sequence comprises a heterologous promoter that drives expression of the mtDNA editing system provided herein (e.g., deamination of mitochondrial DNA by a fusion protein or multiple fusion proteins) components.

[0634] In some embodiments, a kit further comprises a set of instructions for using the fusion proteins and/or carrying out the methods herein.

[0635] Some aspects of this disclosure provides kits comprising a nucleic acid construct, comprising (a) a nucleotide sequence encoding a fusion protein (e.g., a mitoTALE and portion of a DddA) and (b) a heterologous promoter that drives expression of the sequence of (a).

[0636] Some aspects of this disclosure provide cells comprising any of the constructs disclosed herein. In some embodiments, a host cell is transiently or non-transiently transfected with one or more vectors described herein. In some embodiments, a cell is transfected as it naturally occurs in a subject. In some embodiments, a cell that is transfected is taken from a subject. In some embodiments, the cell is derived from cells taken from a subject, such as a cell line. A wide variety of cell lines for tissue culture are known in the art. Examples of cell lines include, but are not limited to, C8161, CCRF-CEM, MOLT, mIMCD-3, NHDF, HeLa-S3, Huh1, Huh4, Huh7, HUVEC, HASMC, HEKn, HEKa, MiaPaCell, Panc1, PC-3, TF1, CTLL-2, C1R, Rat6, CV1, RPTE, A10, T24, J82, A375, ARH-77, Calu1, SW480, SW620, SKOV3, SK-UT, CaCo2, P388D1, SEM-K2, WEHI-231, HB56, TIB55, Jurkat, J45.01, LRMB, Bcl-1, BC-3, IC21, DLD2, Raw264.7, NRK, NRK-52E, MRC5, MEF, Hep G2, HeLa B, HeLa T4, COS, COS-1, COS-6, COS-M6A, BS-C-1 monkey kidney epithelial, BALB/3T3 mouse embryo fibroblast, 3T3 Swiss, 3T3-L1, 132-d5 human fetal fibroblasts; 10.1 mouse fibroblasts, 293-T, 3T3, 721, 9L, A2780, A2780ADR, A2780cis, A 172, A20, A253, A431, A-549, ALC, B16, B35, BCP-1 cells, BEAS-2B, bEnd.3, BHK-21, BR 293, BxPC3, C3H-10T1/2, C6/36, Cal-27, CHO, CHO-7, CHO-IR, CHO-K1, CHO-K2, CHO-T, CHO Dhfr−/−, COR-L23, COR-L23/CPR, COR-L23/5010, COR-L23/R23, COS-7, COV-434, CML T1, CMT, CT26, D17, DH82, DU145, DuCaP, EL4, EM2, EM3, EMT6/AR1, EMT6/AR10.0, FM3, H1299, H69, HB54, HB55, HCA2, HEK-293, HeLa, Hepa1c1c7, HL-60, HMEC, HT-29, Jurkat, JY cells, K562 cells, Ku812, KCL22, KG1, KYO1, LNCap, Ma-Mel 1-48, MC-38, MCF-7, MCF-10A, MDA-MB-231, MDA-MB-468, MDA-MB-435, MDCK II, MDCK 11, MOR/0.2R, MONO-MAC 6, MTD-1A, MyEnd, NCI-H69/CPR, NCI-H69/LX10, NCI-H69/LX20, NCI-H69/LX4, NIH-3T3, NALM-1, NW-145, OPCN/OPCT cell lines, Peer, PNT-1A/PNT 2, RenCa, RIN-5F, RMA/RMAS, Saos-2 cells, Sf-9, SkBr3, T2, T-47D, T84, THP1 cell line, U373, U87, U937, VCaP, Vero cells, WM39, WT-49, X63, YAC-1, YAR, and transgenic varieties thereof. Cell lines are available from a variety of sources known to those with skill in the art (see, e.g., the American Type Culture Collection (ATCC) (Manassas, Va.)). In some embodiments, a cell transfected with one or more vectors described herein is used to establish a new cell line comprising one or more vector-derived sequences. In some embodiments, a cell transiently transfected with the components of a fusion protein system as described herein (such as by transient transfection of one or more vectors, or transfection with RNA), and modified through the activity of a fusion protein complex, is used to establish a new cell line comprising cells containing the modification but lacking any other exogenous sequence. In some embodiments, cells transiently or non-transiently transfected with one or more vectors described herein, or cell lines derived from such cells are used in assessing one or more test compounds.

### XIII. Sequences

[0637] In addition to the herein described evolved DddA proteins, the following sequences form a part of disclosure. Any of the following DddA proteins may be used as a starting point sequence to apply a continuous evolution process (e.g., described in FIG. 2) to obtain an evolved DddA variant for use in the base editors described herein. In addition, any of the following described fusion proteins having a DddA domain may be modified by evolving the DddA protein using one or more continuous evolutionary processes, such as PACE, described herein. The below sequences are contemplated, as well as fragments or variants thereof. including amino acid sequences having at least 70%, at least 75%, at least 80%, at least 85%, at least 90%, at least 95%, at least 96%, at least 97%, at least 98%, at least 99%, or 100% sequence identity with any of the below sequences.

### Split-DddAₜₒₓ-Cas9 Fusions Sequences

(A)G1397 DddAₜₒₓ₋N
(SEQ ID NO: 329)
GGCAGCTACGCCCTGGGTCCGTATCAGATTAGCGCCCCGCAGCTGCCAGCTTACAATGGTCAGAC
CGTGGGTACCTTCTACTATGTGAACGACGCGGGCGGTCTGGAGAGCAAGGTGTTTAGCAGCGGCG
GTCCAACCCCGTACCCAAACTATGCCAATGCCGGTCATGTGGAGGGTCAGAGCGCCCTGTTCATG
CGTGATAACGGCATCAGCGAGGGTCTGGTGTTCCACAACAACCCGGAAGGCACCTGCGGTTTTTG
CGTGAACATGACCGAGACCCTGCTGCCGGAAAACGCGAAAATGACCGTGGTGCCGCCGGAAGGT
Translated amino acid sequence:
(SEQ ID NO: 340)
GSYALGPYQISAPQLPAYNGQTVGTFYYVNDAGGLESKVFSSGGPTPYPNYANAGHVEGQSALFMRD
NGISEGLVFHNNPEGTCGFCVNMTETLLPENAKMTVVPPEG
(B) G1397 DddAₜₒₓ₋C
(SEQ ID NO: 330)
GCCATTCCAGTGAAGCGCGGCGCTACCGGTGAAACCAAAGTGTTTACCGGTAACAGCAACAGCC
CGAAGAGCCCGACCAAAGGCGGTTGC
Translated amino acid sequence:
(SEQ ID NO: 341)
AIPVKRGATGETKVFTGNSNSPKSPTKGGC

[chemical structure]

(SEQ ID NO: 331)
GGCAGCTACGCCCTGGGTCCGTATCAGATTAGCGCCCCGCAGCTGCCAGCTTACAATGGTCAGAC
CGTGGGTACCTTCTACTATGTGAACGACGCGGGCGGTCTGGAGAGCAAGGTGTTTAGCAGCGGCG
GTTCTGGTGGTTCTTCTGGTGGTTCTAGCGGCAGCGAGACTCCCGGGACCTCAGAGTCCGCCACA
CCCGAAAGTAGTGGCGGCAGCAGCGGCGGCAGCGGGAAACGGAACTACATCCTGGGGCTTGC
CATTGGGATAACCAGCGTTGGCTACGGAATTATTGATTATGAGACACGCGATGTGATTGAC
GCCGGGGTTAGGCTGTTCAAAGAGGCCAACGTTGAAAACAACGAGGGAAGACGGAGTAAG
CGCGGAGCAAGAAGACTCAAGCGCAGACGGAGACATCGGATTCAGAGGGTGAAAAAGCTG
CTCTTCGATTACAATCTCCTGACCGATCATAGTGAGCTGAGCGGAATCAACCCCTACGAGG
CGCGAGTGAAAGGGCTTTCCCAGAAGCTGTCCGAAGAGGAGTTCTCCGCCGCGTTGCTGCA
CCTGGCCAAACGGAGGGGGGTTCACAATGTAAACGAAGTGGAGGAGGACACGGGCAATGA
ACTTAGTACGAAAGAACAGATCAGTAGGAACTCTAAGGCTCTCGAAGAGAAATACGTCGCT
GAGTTGCAGCTTGAGAGACTGAAAAAAGACGGCGAAGTACGCGGATCTATTAATAGGTTCA
AGACTTCAGATTACGTAAAGGAAGCCAAGCAGCTCCTGAAAGTACAGAAAGCGTACCATCA
GCTCGATCAGAGCTTCATCGATACCTACATAGATTTGCTGGAGACACGGAGGACATACTAC
GAGGGCCCAGGGGAAGGATCTCCTTTTGGGTGGAAGGACATCAAGGAATGGTACGAGATG
CTTATGGGACATTGTACATATTTTCCGGAGGAGCTCAGGAGCGTCAAGTACGCCTACAATG
CCGACCTGTACAATGCCCTCAATGACCTCAATAACCTCGTGATTACCAGGGACGAGAACGA
GAAGCTGGAGTACTATGAAAAGTTCCAGATTATCGAGAATGTGTTTAAGCAGAAGAAGAAG
CCGACACTTAAGCAGATTGCAAAGGAAATCCTCGTGAATGAGGAAGATATCAAGGGATACA
GAGTGACAAGTACAGGCAAGCCCGAGTTCACAAATCTGAAGGTGTACCACGATATTAAGGA
CATAACCGCACGAAAGGAGATAATCGAAAACGCTGAGCTCCTCGATCAGATCGCAAAAATT
CTTACCATCTACCAGTCTAGTGAGGACATTCAGGAGGAACTGACTAATCTGAACAGTGAGC
TCACCCAAGAGGAAATTGAGCAGATTTCAAACCTGAAAGGCTACACCGGGACGCACAATCT
GAGCCTCAAAGCAATCAACCTCATTCTGGATGAACTTTGGCACACAAATGACAACCAAATTG
CCATATTCAACCGCCTGAAACTGGTGCCAAAAAAAGTGGATCTGTCACAGCAAAAGGAAAT
CCCTACAACCTTGGTTGACGATTTTATTCTGTCCCCCGTTGTCAAGCGGAGCTTCATCCAGT
CAATCAAGGTGATCAATGCCATCATTAAAAAATACGGATTGCCAAACGATATAATTATCGAG
CTTGCACGAGAGAAGAACTCAAAGGACGCCCAGAAGATGATTAACGAAATGCAGAAGCGCA
ACCGCCAGACAAACGAACGCATAGAGGAAATTATAAGAACAACCGGCAAAGAGAATGCCAA
GTATCTGATCGAGAAAATCAAGCTGCACGACATGCAAGAAGGCAAGTGCCTGTACTCTCTG
GAAGCTATCCCACTCGAAGATCTGCTGAATAATCCATTCAATTACGAGGTGGACCACATCAT
CCCTAGATCCGTAAGCTTTGACAATTCCTTCAATAACAAAGTTCTGGTTAAACAGGAGGAAA
ATTCTAAAAAAGGGAACCGGACCCCGTTCCAGTACCTGAGCTCCAGTGACAGCAAGATTAG
CTACGAGACTTTTAAGAAACATATTCTGAATCTGGCCAAAGGCAAAGGCAGGATCAGCAAG
ACCAAGAAGGAGTACCTCCTCGAAGAACGCGACATTAACAGATTTAGTGTGCAGAAAGATT
TCATCAACCGAAACCTTGTCGATACTCGGTACGCCACGAGAGGCCTGATGAATCTCCTCAG
GAGCTACTTCCGCGTCAATAATCTGGACGTTAAAGTCAAGAGCATAAATGGGGGATTCACC
AGCTTTCTGAGGAGAAAGTGGAAGTTTAAGAAGGAACGAAACAAAGGATACAAGCACCATG
CTGAGGATGCTTTGATCATCGCTAACGCGGACTTTATCTTTAAGGAATGGAAAAAGCTGGAT
AAGGCAAAGAAAGTGATGGAAAACCAGATGTTCGAGGAGAAGCAGGCAGAGTCAATGCCT
GAGATCGAGACAGAGCAGGAATACAAGGAAATTTTCATCACCCCTCATCAGATTAAACACA
TAAAGGACTTCAAAGACTATAAATACTCTCATAGGGTGGACAAAAAACCCAATCGCAAGCTC
ATTAATGACACCCTGTACTCAACACGGAAGGATGATAAAGGTAATACCTTGATTGTGAATAA
TCTTAATGGATTGTATGACAAAGATAACGACAAGCTCAAGAAGCTGATCAACAAGTCTCCAG
AGAAGCTCCTTATGTATCACCACGACCCACAGACTTATCAGAAATTGAAACTGATCATGGAG
CAATACGGGGATGAGAAGAACCCACTCTACAAATATTATGAGGAAACAGGTAATTACCTGA
CCAAGTACTCCAAGAAGGATAACGGACCAGTGATCAAAAAGATAAAGTACTATGGCAACAA
ACTTAATGCGCATTTGGACATAACTGACGATTACCCCAATTCTCGAAACAAGGTTGTGAAGC
TCTCCCTGAAGCCTTATAGATTTGACGTGTACCTGGATAATGGGGTTTATAAATTCGTCACC
GTGAAAAATCTGGACGTGATCAAAAAGGAGAACTATTATGAAGTAAACTCAAAGTGCTATG
AGGAGGCGAAGAAGCTGAAGAAGATCTCCAATCAGGCCGAGTTCATCGCTTCCTTCTATAA
GAACGATCTCATCAAGATCAATGGAGAGCTTTATCGCGTCATTGGTGTGAACAATGACTTGC
TGAACAGGATCGAAGTCAATATGATAGACATTACCTACCGGGAGTATCTCGAAAACATGAA
TGATAAACGGCCGCCTCACATCATCAAGACAATCGCATCTAAAACTCAGTCAATAAAAAAGT
ACTCTACCGATATCCTGGGGAATCTCTATGAAGTGAAGTCAAAGAAGCACCCACAAATCATT
AAAAAAGGTGGATCCCCCAAGAAGAAGAGGAAAGTCTCGAGCGACTACAAAGACCATGACG
GTGATTATAAAGATCATGACATCGATTACAAGGATGACGATGACAAGTCTGGTGGTTCTACTA

[chemical structure]

[chemical structure]

[chemical structure]

[chemical structure]

[chemical structure]

CAAGAAGAAGAGGAAAGTC
Translated amino acid sequence:
(SEQ ID NO: 332)
GSYALGPYQISAPQLPAYNGQTVGTFYYVNDAGGLESKVFSSGGSGGSSGGSSGSETPGTSESATPESS
GGSSGGSGKRNYILGLAIGITSVGYGIIDYETRDVIDAGVRLFKEANVENNEGRRSKRGARRLKRRRR
HRIQRVKKLLFDYNLLTDHSELSGINPYEARVKGLSQKLSEEEFSAALLHLAKRRGVHNVNEVEEDTG
NELSTKEQISRNSKALEEKYVAELQLERLKKDGEVRGSINRFKTSDYVKEAKQLLKVQKAYHQLDQS
FIDTYIDLLETRRTYYEGPGEGSPFGWKDIKEWYEMLMGHCTYFPEELRSVKYAYNADLYNALNDLN
NLVITRDENEKLEYYEKFQIIENVFKQKKKPTLKQIAKEILVNEEDIKGYRVTSTGKPEFTNLKVYHDIK
DITARKEIIENAELLDQIAKILTIYQSSEDIQEELTNLNSELTQEEIEQISNLKGYTGTHNLSLKAINLILDE
LWHTNDNQIAIFNRLKLVPKKVDLSQQKEIPTTLVDDFILSPVVKRSFIQSIKVINAIIKKYGLPNDIIIEL
AREKNSKDAQKMINEMQKRNRQTNERIEEIIRTTGKENAKYLIEKIKLHDMQEGKCLYSLEAIPLEDLL
NNPFNYEVDHIIPRSVSFDNSFNNKVLVKQEENSKKGNRTPFQYLSSSDSKISYETFKKHILNLAKGKG
RISKTKKEYLLEERDINRFSVQKDFINRNLVDTRYATRGLMNLLRSYFRVNNLDVKVKSINGGFTSFLR
RKWKFKKERNKGYKHHAEDALIIANADFIFKEWKKLDKAKKVMENQMFEEKQAESMPEIETEQEYK
EIFITPHQIKHIKDFKDYKYSHRVDKKPNRKLINDTLYSTRKDDKGNTLIVNNLNGLYDKDNDKLKKLI
NKSPEKLLMYHHDPQTYQKLKLIMEQYGDEKNPLYKYYEETGNYLTKYSKKDNGPVIKKIKYYGNK
LNAHLDITDDYPNSRNKVVKLSLKPYRFDVYLDNGVYKFVTVKNLDVIKKENYYEVNSKCYEEAKK
LKKISNQAEFIASFYKNDLIKINGELYRVIGVNNDLLNRIEVNMIDITYREYLENMNDKRPPHIIKTIASK
TQSIKKYSTDILGNLYEVKSKKHPQIIKKGGSPKKKRKVSSDYKDHDGDYKDHDIDYKDDDDKSGGS
TNLSDIIEKETGKQLVIQESILMLPEEVEEVIGNKPESDILVHTAYDESTDENVMLLTSDAPEYKPWALV
IQDSNGENKIKMLSGGSPKKKRKV

[chemical structure]

(SEQ ID NO: 333)
CCAACCCCGTACCCAAACTATGCCAATGCCGGTCATGTGGAGGGTCAGAGCGCCCTGTTCATGCG
TGATAACGGCATCAGCGAGGGTCTGGTGTTCCACAACAACCCGGAAGGCACCTGCGGTTTTTGCG
TGAACATGACCGAGACCCTGCTGCCGGAAAACGCGAAAATGACCGTGGTGCCGCCGGAAGGTGC
CATTCCAGTGAAGCGCGGCGCTACCGGTGAAACCAAAGTGTTTACCGGTAACAGCAACAGCCCG
AAGAGCCCGACCAAAGGCGGTTGCTCTGGTGGTTCTTCTGGTGGTTCTAGCGGCAGCGAGACTCC
CGGGACCTCAGAGTCCGCCACACCCGAAAGTAGTGGCGGCAGCAGCGGCGGCAGCGGGAAACG
GAACTACATCCTGGGGCTTGCCATTGGGATAACCAGCGTTGGCTACGGAATTATTGATTAT
GAGACACGCGATGTGATTGACGCCGGGGTTAGGCTGTTCAAAGAGGCCAACGTTGAAAACA
ACGAGGGAAGACGGAGTAAGCGCGGAGCAAGAAGACTCAAGCGCAGACGGAGACATCGGA
TTCAGAGGGTGAAAAAGCTGCTCTTCGATTACAATCTCCTGACCGATCATAGTGAGCTGAG
CGGAATCAACCCCTACGAGGCGCGAGTGAAAGGGCTTTCCCAGAAGCTGTCCGAAGAGGA
GTTCTCCGCCGCGTTGCTGCACCTGGCCAAACGGAGGGGGGTTCACAATGTAAACGAAGTG
GAGGAGGACACGGGCAATGAACTTAGTACGAAAGAACAGATCAGTAGGAACTCTAAGGCTC
TCGAAGAGAAATACGTCGCTGAGTTGCAGCTTGAGAGACTGAAAAAAGACGGCGAAGTACG
CGGATCTATTAATAGGTTCAAGACTTCAGATTACGTAAAGGAAGCCAAGCAGCTCCTGAAA
GTACAGAAAGCGTACCATCAGCTCGATCAGAGCTTCATCGATACCTACATAGATTTGCTGGA
GACACGGAGGACATACTACGAGGGCCCAGGGGAAGGATCTCCTTTTGGGTGGAAGGACAT
CAAGGAATGGTACGAGATGCTTATGGGACATTGTACATATTTTCCGGAGGAGCTCAGGAGC
GTCAAGTACGCCTACAATGCCGACCTGTACAATGCCCTCAATGACCTCAATAACCTCGTGAT
TACCAGGGACGAGAACGAGAAGCTGGAGTACTATGAAAAGTTCCAGATTATCGAGAATGTG
TTTAAGCAGAAGAAGAAGCCGACACTTAAGCAGATTGCAAAGGAAATCCTCGTGAATGAGG
AAGATATCAAGGGATACAGAGTGACAAGTACAGGCAAGCCCGAGTTCACAAATCTGAAGGT
GTACCACGATATTAAGGACATAACCGCACGAAAGGAGATAATCGAAAACGCTGAGCTCCTC
GATCAGATCGCAAAAATTCTTACCATCTACCAGTCTAGTGAGGACATTCAGGAGGAACTGA
CTAATCTGAACAGTGAGCTCACCCAAGAGGAAATTGAGCAGATTTCAAACCTGAAAGGCTA
CACCGGGACGCACAATCTGAGCCTCAAAGCAATCAACCTCATTCTGGATGAACTTTGGCAC
ACAAATGACAACCAAATTGCCATATTCAACCGCCTGAAACTGGTGCCAAAAAAAGTGGATCT
GTCACAGCAAAAGGAAATCCCTACAACCTTGGTTGACGATTTTATTCTGTCCCCCGTTGTCA
AGCGGAGCTTCATCCAGTCAATCAAGGTGATCAATGCCATCATTAAAAAATACGGATTGCCA
AACGATATAATTATCGAGCTTGCACGAGAGAAGAACTCAAAGGACGCCCAGAAGATGATTA
ACGAAATGCAGAAGCGCAACCGCCAGACAAACGAACGCATAGAGGAAATTATAAGAACAAC
CGGCAAAGAGAATGCCAAGTATCTGATCGAGAAAATCAAGCTGCACGACATGCAAGAAGGC
AAGTGCCTGTACTCTCTGGAAGCTATCCCACTCGAAGATCTGCTGAATAATCCATTCAATTA
CGAGGTGGACCACATCATCCCTAGATCCGTAAGCTTTGACAATTCCTTCAATAACAAAGTTC
TGGTTAAACAGGAGGAAAATTCTAAAAAAGGGAACCGGACCCCGTTCCAGTACCTGAGCTC
CAGTGACAGCAAGATTAGCTACGAGACTTTTAAGAAACATATTCTGAATCTGGCCAAAGGC
AAAGGCAGGATCAGCAAGACCAAGAAGGAGTACCTCCTCGAAGAACGCGACATTAACAGAT
TTAGTGTGCAGAAAGATTTCATCAACCGAAACCTTGTCGATACTCGGTACGCCACGAGAGG
CCTGATGAATCTCCTCAGGAGCTACTTCCGCGTCAATAATCTGGACGTTAAAGTCAAGAGCA
TAAATGGGGGATTCACCAGCTTTCTGAGGAGAAAGTGGAAGTTTAAGAAGGAACGAAACAA
AGGATACAAGCACCATGCTGAGGATGCTTTGATCATCGCTAACGCGGACTTTATCTTTAAGG
AATGGAAAAAGCTGGATAAGGCAAAGAAAGTGATGGAAAACCAGATGTTCGAGGAGAAGCA
GGCAGAGTCAATGCCTGAGATCGAGACAGAGCAGGAATACAAGGAAATTTTCATCACCCCT
CATCAGATTAAACACATAAAGGACTTCAAAGACTATAAATACTCTCATAGGGTGGACAAAAA
ACCCAATCGCAAGCTCATTAATGACACCCTGTACTCAACACGGAAGGATGATAAAGGTAAT
ACCTTGATTGTGAATAATCTTAATGGATTGTATGACAAAGATAACGACAAGCTCAAGAAGCT
GATCAACAAGTCTCCAGAGAAGCTCCTTATGTATCACCACGACCCACAGACTTATCAGAAAT
TGAAACTGATCATGGAGCAATACGGGGATGAGAAGAACCCACTCTACAAATATTATGAGGA
AACAGGTAATTACCTGACCAAGTACTCCAAGAAGGATAACGGACCAGTGATCAAAAAGATA
AAGTACTATGGCAACAAACTTAATGCGCATTTGGACATAACTGACGATTACCCCAATTCTCG
AAACAAGGTTGTGAAGCTCTCCCTGAAGCCTTATAGATTTGACGTGTACCTGGATAATGGG
GTTTATAAATTCGTCACCGTGAAAAATCTGGACGTGATCAAAAAGGAGAACTATTATGAAGT
AAACTCAAAGTGCTATGAGGAGGCGAAGAAGCTGAAGAAGATCTCCAATCAGGCCGAGTTC
ATCGCTTCCTTCTATAAGAACGATCTCATCAAGATCAATGGAGAGCTTTATCGCGTCATTGG
TGTGAACAATGACTTGCTGAACAGGATCGAAGTCAATATGATAGACATTACCTACCGGGAG
TATCTCGAAAACATGAATGATAAACGGCCGCCTCACATCATCAAGACAATCGCATCTAAAAC
TCAGTCAATAAAAAAGTACTCTACCGATATCCTGGGGAATCTCTATGAAGTGAAGTCAAAGA
AGCACCCACAAATCATTAAAAAAGGTGGATCCCCCAAGAAGAAGAGGAAAGTCTCGAGCGA
CTACAAAGACCATGACGGTGATTATAAAGATCATGACATCGATTACAAGGATGACGATGAC

[chemical structure]

[chemical structure]

[chemical structure]

[chemical structure]

[chemical structure]

Translated amino acid sequence:
(SEQ ID NO: 334)
PTPYPNYANAGHVEGQSALFMRDNGISEGLVFHNNPEGTCGFCVNMTETLLPENAKMTVVPPEGAIP
VKRGATGETKVFTGNSNSPKSPTKGGCSGGSSGGSSGSETPGTSESATPESSGGSSGGSGKRNYILGLAI
GITSVGYGIIDYETRDVIDAGVRLFKEANVENNEGRRSKRGARRLKRRRRHRIQRVKKLLFDYNLLTD
HSELSGINPYEARVKGLSQKLSEEEFSAALLHLAKRRGVHNVNEVEEDTGNELSTKEQISRNSKALEE
KYVAELQLERLKKDGEVRGSINRFKTSDYVKEAKQLLKVQKAYHQLDQSFIDTYIDLLETRRTYYEGP
GEGSPFGWKDIKEWYEMLMGHCTYFPEELRSVKYAYNADLYNALNDLNNLVITRDENEKLEYYEKF
QIIENVFKQKKKPTLKQIAKEILVNEEDIKGYRVTSTGKPEFTNLKVYHDIKDITARKEIIENAELLDQIA
KILTIYQSSEDIQEELTNLNSELTQEEIEQISNLKGYTGTHNLSLKAINLILDELWHTNDNQIAIFNRLKL
VPKKVDLSQQKEIPTTLVDDFILSPVVKRSFIQSIKVINAIIKKYGLPNDIIIELAREKNSKDAQKMINEM
QKRNRQTNERIEEIIRTTGKENAKYLIEKIKLHDMQEGKCLYSLEAIPLEDLLNNPFNYEVDHIIPRSVSF
DNSFNNKVLVKQEENSKKGNRTPFQYLSSSDSKISYETFKKHILNLAKGKGRISKTKKEYLLEERDINR
FSVQKDFINRNLVDTRYATRGLMNLLRSYFRVNNLDVKVKSINGGFTSFLRRKWKFKKERNKGYKH
HAEDALIIANADFIFKEWKKLDKAKKVMENQMFEEKQAESMPEIETEQEYKEIFITPHQIKHIKDFKDY
KYSHRVDKKPNRKLINDTLYSTRKDDKGNTLIVNNLNGLYDKDNDKLKKLINKSPEKLLMYHHDPQT
YQKLKLIMEQYGDEKNPLYKYYEETGNYLTKYSKKDNGPVIKKIKYYGNKLNAHLDITDDYPNSRNK
VVKLSLKPYRFDVYLDNGVYKFVTVKNLDVIKKENYYEVNSKCYEEAKKLKKISNQAEFIASFYKND
LIKINGELYR VIGVNNDLLNRIEVNMIDITYREYLENMNDKRPPHIIKTIASKTQSIKKYSTDILGNLYEV
KSKKHPQIIKKGGSPKKKRKVSSDYKDHDGDYKDHDIDYKDDDDKSGGSTNLSDIIEKETGKQLVIQE
SILMLPEEVEEVIGNKPESDILVHTAYDESTDENVMLLTSDAPEYKPWALVIQDSNGENKIKMLSGGSP
KKKRKV
(E) G1333 DddAₜₒₓ₋N-dSpCas9-2x-UGI
(SEQ ID NO: 335)
AAACGGACAGCCGACGGAAGCGAGTTCGAGTCACCAAAGAAGAAGCGGAAAGTCGGCAGCTAC
GCCCTGGGTCCGTATCAGATTAGCGCCCCGCAGCTGCCAGCTTACAATGGTCAGACCGTGGGTAC
CTTCTACTATGTGAACGACGCGGGCGGTCTGGAGAGCAAGGTGTTTAGCAGCGGCGGTTCTGGAG
GATCTAGCGGAGGATCCTCTGGCAGCGAGACACCAGGAACAAGCGAGTCAGCAACACCAGAGAG
CAGTGGCGGCAGCAGCGGCGGCAGCGACAAGAAGTACAGCATCGGCCTGGCCATCGGCACCA
ACTCTGTGGGCTGGGCCGTGATCACCGACGAGTACAAGGTGCCCAGCAAGAAATTCAAGGT
GCTGGGCAACACCGACCGGCACAGCATCAAGAAGAACCTGATCGGAGCCCTGCTGTTCGAC
AGCGGCGAAACAGCCGAGGCCACCCGGCTGAAGAGAACCGCCAGAAGAAGATACACCAGA
CGGAAGAACCGGATCTGCTATCTGCAAGAGATCTTCAGCAACGAGATGGCCAAGGTGGACG
ACAGCTTCTTCCACAGACTGGAAGAGTCCTTCCTGGTGGAAGAGGATAAGAAGCACGAGCG
GCACCCCATCTTCGGCAACATCGTGGACGAGGTGGCCTACCACGAGAAGTACCCCACCATC
TACCACCTGAGAAAGAAACTGGTGGACAGCACCGACAAGGCCGACCTGCGGCTGATCTATC
TGGCCCTGGCCCACATGATCAAGTTCCGGGGCCACTTCCTGATCGAGGGCGACCTGAACCC
CGACAACAGCGACGTGGACAAGCTGTTCATCCAGCTGGTGCAGACCTACAACCAGCTGTTC
GAGGAAAACCCCATCAACGCCAGCGGCGTGGACGCCAAGGCCATCCTGTCTGCCAGACTGA
GCAAGAGCAGACGGCTGGAAAATCTGATCGCCCAGCTGCCCGGCGAGAAGAAGAATGGCC
TGTTCGGAAACCTGATTGCCCTGAGCCTGGGCCTGACCCCCAACTTCAAGAGCAACTTCGA
CCTGGCCGAGGATGCCAAACTGCAGCTGAGCAAGGACACCTACGACGACGACCTGGACAAC
CTGCTGGCCCAGATCGGCGACCAGTACGCCGACCTGTTTCTGGCCGCCAAGAACCTGTCCG
ACGCCATCCTGCTGAGCGACATCCTGAGAGTGAACACCGAGATCACCAAGGCCCCCCTGAG
CGCCTCTATGATCAAGAGATACGACGAGCACCACCAGGACCTGACCCTGCTGAAAGCTCTC
GTGCGGCAGCAGCTGCCTGAGAAGTACAAAGAGATTTTCTTCGACCAGAGCAAGAACGGCT
ACGCCGGCTACATTGACGGCGGAGCCAGCCAGGAAGAGTTCTACAAGTTCATCAAGCCCAT
CCTGGAAAAGATGGACGGCACCGAGGAACTGCTCGTGAAGCTGAACAGAGAGGACCTGCT
GCGGAAGCAGCGGACCTTCGACAACGGCAGCATCCCCCACCAGATCCACCTGGGAGAGCT
GCACGCCATTCTGCGGCGGCAGGAAGATTTTTACCCATTCCTGAAGGACAACCGGGAAAAG
ATCGAGAAGATCCTGACCTTCCGCATCCCCTACTACGTGGGCCCTCTGGCCAGGGGAAACA
GCAGATTCGCCTGGATGACCAGAAAGAGCGAGGAAACCATCACCCCCTGGAACTTCGAGGA
AGTGGTGGACAAGGGCGCTTCCGCCCAGAGCTTCATCGAGCGGATGACCAACTTCGATAAG
AACCTGCCCAACGAGAAGGTGCTGCCCAAGCACAGCCTGCTGTACGAGTACTTCACCGTGT
ATAACGAGCTGACCAAAGTGAAATACGTGACCGAGGGAATGAGAAAGCCCGCCTTCCTGAG
CGGCGAGCAGAAAAAGGCCATCGTGGACCTGCTGTTCAAGACCAACCGGAAAGTGACCGTG
AAGCAGCTGAAAGAGGACTACTTCAAGAAAATCGAGTGCTTCGACTCCGTGGAAATCTCCG
GCGTGGAAGATCGGTTCAACGCCTCCCTGGGCACATACCACGATCTGCTGAAAATTATCAA
GGACAAGGACTTCCTGGACAATGAGGAAAACGAGGACATTCTGGAAGATATCGTGCTGACC
CTGACACTGTTTGAGGACAGAGAGATGATCGAGGAACGGCTGAAAACCTATGCCCACCTGT
TCGACGACAAAGTGATGAAGCAGCTGAAGCGGCGGAGATACACCGGCTGGGGCAGGCTGA
GCCGGAAGCTGATCAACGGCATCCGGGACAAGCAGTCCGGCAAGACAATCCTGGATTTCCT
GAAGTCCGACGGCTTCGCCAACAGAAACTTCATGCAGCTGATCCACGACGACAGCCTGACC
TTTAAAGAGGACATCCAGAAAGCCCAGGTGTCCGGCCAGGGCGATAGCCTGCACGAGCACA
TTGCCAATCTGGCCGGCAGCCCCGCCATTAAGAAGGGCATCCTGCAGACAGTGAAGGTGGT
GGACGAGCTCGTGAAAGTGATGGGCCGGCACAAGCCCGAGAACATCGTGATCGAAATGGC
CAGAGAGAACCAGACCACCCAGAAGGGACAGAAGAACAGCCGCGAGAGAATGAAGCGGAT
CGAAGAGGGCATCAAAGAGCTGGGCAGCCAGATCCTGAAAGAACACCCCGTGGAAAACAC
CCAGCTGCAGAACGAGAAGCTGTACCTGTACTACCTGCAGAATGGGCGGGATATGTACGTG
GACCAGGAACTGGACATCAACCGGCTGTCCGACTACGATGTGGACGCTATCGTGCCTCAGA
GCTTTCTGAAGGACGACTCCATCGACAACAAGGTGCTGACCAGAAGCGACAAGAACCGGGG
CAAGAGCGACAACGTGCCCTCCGAAGAGGTCGTGAAGAAGATGAAGAACTACTGGCGGCA
GCTGCTGAACGCCAAGCTGATTACCCAGAGAAAGTTCGACAATCTGACCAAGGCCGAGAGA
GGCGGCCTGAGCGAACTGGATAAGGCCGGCTTCATCAAGAGACAGCTGGTGGAAACCCGG
CAGATCACAAAGCACGTGGCACAGATCCTGGACTCCCGGATGAACACTAAGTACGACGAGA
ATGACAAGCTGATCCGGGAAGTGAAAGTGATCACCCTGAAGTCCAAGCTGGTGTCCGATTT
CCGGAAGGATTTCCAGTTTTACAAAGTGCGCGAGATCAACAACTACCACCACGCCCACGAC
GCCTACCTGAACGCCGTCGTGGGAACCGCCCTGATCAAAAAGTACCCTAAGCTGGAAAGCG
AGTTCGTGTACGGCGACTACAAGGTGTACGACGTGCGGAAGATGATCGCCAAGAGCGAGCA
GGAAATCGGCAAGGCTACCGCCAAGTACTTCTTCTACAGCAACATCATGAACTTTTTCAAGA
CCGAGATTACCCTGGCCAACGGCGAGATCCGGAAGCGGCCTCTGATCGAGACAAACGGCG
AAACCGGGGAGATCGTGTGGGATAAGGGCCGGGATTTTGCCACCGTGCGGAAAGTGCTGA
GCATGCCCCAAGTGAATATCGTGAAAAAGACCGAGGTGCAGACAGGCGGCTTCAGCAAAGA
GTCTATCCTGCCCAAGAGGAACAGCGATAAGCTGATCGCCAGAAAGAAGGACTGGGACCCT
AAGAAGTACGGCGGCTTCGACAGCCCCACCGTGGCCTATTCTGTGCTGGTGGTGGCCAAAG
TGGAAAAGGGCAAGTCCAAGAAACTGAAGAGTGTGAAAGAGCTGCTGGGGATCACCATCAT
GGAAAGAAGCAGCTTCGAGAAGAATCCCATCGACTTTCTGGAAGCCAAGGGCTACAAAGAA
GTGAAAAAGGACCTGATCATCAAGCTGCCTAAGTACTCCCTGTTCGAGCTGGAAAACGGCC
GGAAGAGAATGCTGGCCTCTGCCGGCGAACTGCAGAAGGGAAACGAACTGGCCCTGCCCT
CCAAATATGTGAACTTCCTGTACCTGGCCAGCCACTATGAGAAGCTGAAGGGCTCCCCCGA
GGATAATGAGCAGAAACAGCTGTTTGTGGAACAGCACAAGCACTACCTGGACGAGATCATC
GAGCAGATCAGCGAGTTCTCCAAGAGAGTGATCCTGGCCGACGCTAATCTGGACAAAGTGC
TGTCCGCCTACAACAAGCACCGGGATAAGCCCATCAGAGAGCAGGCCGAGAATATCATCCA
CCTGTTTACCCTGACCAATCTGGGAGCCCCTGCCGCCTTCAAGTACTTTGACACCACCATCG
ACCGGAAGAGGTACACCAGCACCAAAGAGGTGCTGGACGCCACCCTGATCCACCAGAGCAT
CACCGGCCTGTACGAGACACGGATCGACCTGTCTCAGCTGGGAGGTGACAGCGGCGGGAGC

[chemical structure]

[chemical structure]

[chemical structure]

[chemical structure]

[chemical structure]

[chemical structure]

[chemical structure]

[chemical structure]

[chemical structure]

CGAATTCGAGCCCAAGAAGAAGAGGAAAGTC
Translated amino acid sequence:
(SEQ ID NO: 336)
KRTADGSEFESPKKKRKVGSYALGPYQISAPQLPAYNGQTVGTFYYVNDAGGLESKVFSSGGSGGSS
GGSSGSETPGTSESATPESSGGSSGGSDKKYSIGLAIGTNSVGWAVITDEYKVPSKKFKVLGNTDRHSI
KKNLIGALLFDSGETAEATRLKRTARRRYTRRKNRICYLQEIFSNEMAKVDDSFFHRLEESFLVEEDKK
HERHPIFGNIVDEVAYHEKYPTIYHLRKKL VDSTDKADLRLIYLALAHMIKFRGHFLIEGDLNPDNSDV
DKLFIQLVQTYNQLFEENPINASGVDAKAILSARLSKSRRLENLIAQLPGEKKNGLFGNLIALSLGLTPN
FKSNFDLAEDAKLQLSKDTYDDDLDNLLAQIGDQYADLFLAAKNLSDAILLSDILRVNTEITKAPLSAS
MIKRYDEHHQDLTLLKALVRQQLPEKYKEIFFDQSKNGYAGYIDGGASQEEFYKFIKPILEKMDGTEE
LLVKLNREDLLRKQRTFDNGSIPHQIHLGELHAILRRQEDFYPFLKDNREKIEKILTFRIPYYVGPLARG
NSRFAWMTRKSEETITPWNFEEVVDKGASAQSFIERMTNFDKNLPNEKVLPKHSLLYEYFTVYNELTK
VKYVTEGMRKPAFLSGEQKKAIVDLLFKTNRKVTVKQLKEDYFKKIECFDSVEISGVEDRFNASLGTY
HDLLKIIKDKDFLDNEENEDILEDIVLTLTLFEDREMIEERLKTYAHLFDDKVMKQLKRRRYTGWGRL
SRKLINGIRDKQSGKTILDFLKSDGFANRNFMQLIHDDSLTFKEDIQKAQVSGQGDSLHEHIANLAGSP
AIKKGILQTVKVVDELVKVMGRHKPENIVIEMARENQTTQKGQKNSRERMKRIEEGIKELGSQILKEH
PVENTQLQNEKLYLYYLQNGRDMYVDQELDINRLSDYDVDAIVPQSFLKDDSIDNKVLTRSDKNRGK
SDNVPSEEVVKKMKNYWRQLLNAKLITQRKFDNLTKAERGGLSELDKAGFIKRQLVETRQITKHVAQ
ILDSRMNTKYDENDKLIREVKVITLKSKLVSDFRKDFQFYKVREINNYHHAHDAYLNAVVGTALIKK
YPKLESEFVYGDYKVYDVRKMIAKSEQEIGKATAKYFFYSNIMNFFKTEITLANGEIRKRPLIETNGET
GEIVWDKGRDFATVRKVLSMPQVNIVKKTEVQTGGFSKESILPKRNSDKLIARKKDWDPKKYGGFDS
PTVAYSVLVVAKVEKGKSKKLKSVKELLGITIMERSSFEKNPIDFLEAKGYKEVKKDLIIKLPKYSLFE
LENGRKRMLASAGELQKGNELALPSKYVNFLYLASHYEKLKGSPEDNEQKQLFVEQHKHYLDEIIEQI
SEFSKRVILADANLDKVLSAYNKHRDKPIREQAENIIHLFTLTNLGAPAAFKYFDTTIDRKRYTSTKEV
LDATLIHQSITGLYETRIDLSQLGGDSGGSGGSGGSTNLSDIIEKETGKQL VIQESILMLPEEVEEVIGNK
PESDIL VHTAYDESTDENVMLLTSDAPEYKPWALVIQDSNGENKIKMLSGGSGGSGGSTNLSDIIEKET
GKQLVIQESILMLPEEVEEVIGNKPESDILVHTAYDESTDENVMLLTSDAPEYKPWALVIQDSNGENKI
KMLSGGSKRTADGSEFEPKKKRKV

[chemical structure]

(SEQ ID NO: 337)
AAACGGACAGCCGACGGAAGCGAGTTCGAGTCACCAAAGAAGAAGCGGAAAGTCCCAACCCCGT
ACCCAAACTATGCCAATGCCGGTCATGTGGAGGGTCAGAGCGCCCTGTTCATGCGTGATAACGGC
ATCAGCGAGGGTCTGGTGTTCCACAACAACCCGGAAGGCACCTGCGGTTTTTGCGTGAACATGAC
CGAGACCCTGCTGCCGGAAAACGCGAAAATGACCGTGGTGCCGCCGGAAGGTGCCATTCCAGTG
AAGCGCGGCGCTACCGGTGAAACCAAAGTGTTTACCGGTAACAGCAACAGCCCGAAGAGCCCGA
CCAAAGGCGGTTGCTTCTGGAGGATCTAGCGGAGGATCCTCTGGCAGCGAGACACCAGGAACAA
GCGAGTCAGCAACACCAGAGAGCAGTGGCGGCAGCAGCGGCGGCAGCGACAAGAAGTACAGCA
TCGGCCTGGCCATCGGCACCAACTCTGTGGGCTGGGCCGTGATCACCGACGAGTACAAGGT
GCCCAGCAAGAAATTCAAGGTGCTGGGCAACACCGACCGGCACAGCATCAAGAAGAACCTG
ATCGGAGCCCTGCTGTTCGACAGCGGCGAAACAGCCGAGGCCACCCGGCTGAAGAGAACC
GCCAGAAGAAGATACACCAGACGGAAGAACCGGATCTGCTATCTGCAAGAGATCTTCAGCA
ACGAGATGGCCAAGGTGGACGACAGCTTCTTCCACAGACTGGAAGAGTCCTTCCTGGTGGA
AGAGGATAAGAAGCACGAGCGGCACCCCATCTTCGGCAACATCGTGGACGAGGTGGCCTAC
CACGAGAAGTACCCCACCATCTACCACCTGAGAAAGAAACTGGTGGACAGCACCGACAAGG
CCGACCTGCGGCTGATCTATCTGGCCCTGGCCCACATGATCAAGTTCCGGGGCCACTTCCT
GATCGAGGGCGACCTGAACCCCGACAACAGCGACGTGGACAAGCTGTTCATCCAGCTGGTG
CAGACCTACAACCAGCTGTTCGAGGAAAACCCCATCAACGCCAGCGGCGTGGACGCCAAGG
CCATCCTGTCTGCCAGACTGAGCAAGAGCAGACGGCTGGAAAATCTGATCGCCCAGCTGCC
CGGCGAGAAGAAGAATGGCCTGTTCGGAAACCTGATTGCCCTGAGCCTGGGCCTGACCCCC
AACTTCAAGAGCAACTTCGACCTGGCCGAGGATGCCAAACTGCAGCTGAGCAAGGACACCT
ACGACGACGACCTGGACAACCTGCTGGCCCAGATCGGCGACCAGTACGCCGACCTGTTTCT
GGCCGCCAAGAACCTGTCCGACGCCATCCTGCTGAGCGACATCCTGAGAGTGAACACCGAG
ATCACCAAGGCCCCCCTGAGCGCCTCTATGATCAAGAGATACGACGAGCACCACCAGGACC
TGACCCTGCTGAAAGCTCTCGTGCGGCAGCAGCTGCCTGAGAAGTACAAAGAGATTTTCTT
CGACCAGAGCAAGAACGGCTACGCCGGCTACATTGACGGCGGAGCCAGCCAGGAAGAGTT
CTACAAGTTCATCAAGCCCATCCTGGAAAAGATGGACGGCACCGAGGAACTGCTCGTGAAG
CTGAACAGAGAGGACCTGCTGCGGAAGCAGCGGACCTTCGACAACGGCAGCATCCCCCACC
AGATCCACCTGGGAGAGCTGCACGCCATTCTGCGGCGGCAGGAAGATTTTTACCCATTCCT
GAAGGACAACCGGGAAAAGATCGAGAAGATCCTGACCTTCCGCATCCCCTACTACGTGGGC
CCTCTGGCCAGGGGAAACAGCAGATTCGCCTGGATGACCAGAAAGAGCGAGGAAACCATCA
CCCCCTGGAACTTCGAGGAAGTGGTGGACAAGGGCGCTTCCGCCCAGAGCTTCATCGAGCG
GATGACCAACTTCGATAAGAACCTGCCCAACGAGAAGGTGCTGCCCAAGCACAGCCTGCTG
TACGAGTACTTCACCGTGTATAACGAGCTGACCAAAGTGAAATACGTGACCGAGGGAATGA
GAAAGCCCGCCTTCCTGAGCGGCGAGCAGAAAAAGGCCATCGTGGACCTGCTGTTCAAGAC
CAACCGGAAAGTGACCGTGAAGCAGCTGAAAGAGGACTACTTCAAGAAAATCGAGTGCTTC
GACTCCGTGGAAATCTCCGGCGTGGAAGATCGGTTCAACGCCTCCCTGGGCACATACCACG
ATCTGCTGAAAATTATCAAGGACAAGGACTTCCTGGACAATGAGGAAAACGAGGACATTCT
GGAAGATATCGTGCTGACCCTGACACTGTTTGAGGACAGAGAGATGATCGAGGAACGGCTG
AAAACCTATGCCCACCTGTTCGACGACAAAGTGATGAAGCAGCTGAAGCGGCGGAGATACA
CCGGCTGGGGCAGGCTGAGCCGGAAGCTGATCAACGGCATCCGGGACAAGCAGTCCGGCA
AGACAATCCTGGATTTCCTGAAGTCCGACGGCTTCGCCAACAGAAACTTCATGCAGCTGAT
CCACGACGACAGCCTGACCTTTAAAGAGGACATCCAGAAAGCCCAGGTGTCCGGCCAGGGC
GATAGCCTGCACGAGCACATTGCCAATCTGGCCGGCAGCCCCGCCATTAAGAAGGGCATCC
TGCAGACAGTGAAGGTGGTGGACGAGCTCGTGAAAGTGATGGGCCGGCACAAGCCCGAGA
ACATCGTGATCGAAATGGCCAGAGAGAACCAGACCACCCAGAAGGGACAGAAGAACAGCC
GCGAGAGAATGAAGCGGATCGAAGAGGGCATCAAAGAGCTGGGCAGCCAGATCCTGAAAG
AACACCCCGTGGAAAACACCCAGCTGCAGAACGAGAAGCTGTACCTGTACTACCTGCAGAA
TGGGCGGGATATGTACGTGGACCAGGAACTGGACATCAACCGGCTGTCCGACTACGATGTG
GACGCTATCGTGCCTCAGAGCTTTCTGAAGGACGACTCCATCGACAACAAGGTGCTGACCA
GAAGCGACAAGAACCGGGGCAAGAGCGACAACGTGCCCTCCGAAGAGGTCGTGAAGAAGA
TGAAGAACTACTGGCGGCAGCTGCTGAACGCCAAGCTGATTACCCAGAGAAAGTTCGACAA
TCTGACCAAGGCCGAGAGAGGCGGCCTGAGCGAACTGGATAAGGCCGGCTTCATCAAGAG
ACAGCTGGTGGAAACCCGGCAGATCACAAAGCACGTGGCACAGATCCTGGACTCCCGGATG
AACACTAAGTACGACGAGAATGACAAGCTGATCCGGGAAGTGAAAGTGATCACCCTGAAGT
CCAAGCTGGTGTCCGATTTCCGGAAGGATTTCCAGTTTTACAAAGTGCGCGAGATCAACAA
CTACCACCACGCCCACGACGCCTACCTGAACGCCGTCGTGGGAACCGCCCTGATCAAAAAG
TACCCTAAGCTGGAAAGCGAGTTCGTGTACGGCGACTACAAGGTGTACGACGTGCGGAAGA
TGATCGCCAAGAGCGAGCAGGAAATCGGCAAGGCTACCGCCAAGTACTTCTTCTACAGCAA
CATCATGAACTTTTTCAAGACCGAGATTACCCTGGCCAACGGCGAGATCCGGAAGCGGCCT
CTGATCGAGACAAACGGCGAAACCGGGGAGATCGTGTGGGATAAGGGCCGGGATTTTGCC
ACCGTGCGGAAAGTGCTGAGCATGCCCCAAGTGAATATCGTGAAAAAGACCGAGGTGCAGA
CAGGCGGCTTCAGCAAAGAGTCTATCCTGCCCAAGAGGAACAGCGATAAGCTGATCGCCAG
AAAGAAGGACTGGGACCCTAAGAAGTACGGCGGCTTCGACAGCCCCACCGTGGCCTATTCT
GTGCTGGTGGTGGCCAAAGTGGAAAAGGGCAAGTCCAAGAAACTGAAGAGTGTGAAAGAG
CTGCTGGGGATCACCATCATGGAAAGAAGCAGCTTCGAGAAGAATCCCATCGACTTTCTGG
AAGCCAAGGGCTACAAAGAAGTGAAAAAGGACCTGATCATCAAGCTGCCTAAGTACTCCCT
GTTCGAGCTGGAAAACGGCCGGAAGAGAATGCTGGCCTCTGCCGGCGAACTGCAGAAGGG
AAACGAACTGGCCCTGCCCTCCAAATATGTGAACTTCCTGTACCTGGCCAGCCACTATGAG
AAGCTGAAGGGCTCCCCCGAGGATAATGAGCAGAAACAGCTGTTTGTGGAACAGCACAAGC
ACTACCTGGACGAGATCATCGAGCAGATCAGCGAGTTCTCCAAGAGAGTGATCCTGGCCGA
CGCTAATCTGGACAAAGTGCTGTCCGCCTACAACAAGCACCGGGATAAGCCCATCAGAGAG
CAGGCCGAGAATATCATCCACCTGTTTACCCTGACCAATCTGGGAGCCCCTGCCGCCTTCA
AGTACTTTGACACCACCATCGACCGGAAGAGGTACACCAGCACCAAAGAGGTGCTGGACGC
CACCCTGATCCACCAGAGCATCACCGGCCTGTACGAGACACGGATCGACCTGTCTCAGCTG

[chemical structure]

[chemical structure]

[chemical structure]

[chemical structure]

[chemical structure]

[chemical structure]

[chemical structure]

[chemical structure]

[chemical structure]

CAAAAAGAACCGCCGACGGCAGCGAATTCGAGCCCAAGAAGAAGAGGAAAGTC

### Split-DddAₜₒₓ-CCR5 TALE Fusions Sequences

[chemical structure]

(SEQ ID NO: 342)
CCCAAGAAGAAGAGGAAGGTGGGCATTCACCGCGGGGTACCTATGGTGGACTTGAGGACACTCG
GTTATTCGCAACAGCAACAGGAGAAAATCAAGCCTAAGGTCAGGAGCACCGTCGCGCAACACCA
CGAGGCGCTTGTGGGGCATGGCTTCACTCATGCGCATATTGTCGCGCTTTCACAGCACCCTGCGG
CGCTTGGGACGGTGGCTGTCAAATACCAAGATATGATTGCGGCCCTGCCCGAAGCCACGCACGAG
GCAATTGTAGGGGTCGGTAAACAGTGGTCGGGAGCGCGAGCACTTGAGGCGCTGCTGACTGTGG
CGGGTGAGCTTAGGGGGCCTCCGCTCCAGCTCGACACCGGGCAGCTGCTGAAGATCGCGAAGAG
AGGGGGAGTAACAGCGGTAGAGGCAGTGCACGCCTGGCGCAATGCGCTCACCGGGGCCCCCTTG
AACCTGACCCCAGACCAGGTAGTCGCAATCGCGTCAAACGGAGGGGGAAAGCAAGCCCTGGAAA
CCGTGCAAAGGTTGTTGCCGGTCCTTTGTCAAGACCACGGCCTTACACCGGAGCAAGTCGTGGCC
ATTGCATCCCACGACGGTGGCAAACAGGCTCTTGAGACGGTTCAGAGACTTCTCCCAGTTCTCTG
TCAAGCCCACGGGCTGACTCCCGATCAAGTTGTAGCGATTGCGTCGAACATTGGAGGGAAACAA
GCATTGGAGACTGTCCAACGGCTCCTTCCCGTGTTGTGTCAAGCCCACGGTTTGACGCCTGCACA
AGTGGTCGCCATCGCCTCGAATGGCGGCGGTAAGCAGGCGCTGGAAACAGTACAGCGCCTGCTG
CCTGTACTGTGCCAGGATCATGGACTGACCCCAGACCAGGTAGTCGCAATCGCGTCAAACGGAGG
GGGAAAGCAAGCCCTGGAAACCGTGCAAAGGTTGTTGCCGGTCCTTTGTCAAGACCACGGCCTTA
CACCGGAGCAAGTCGTGGCCATTGCAAGCAACATCGGTGGCAAACAGGCTCTTGAGACGGTTCA
GAGACTTCTCCCAGTTCTCTGTCAAGCCCACGGGCTGACTCCCGATCAAGTTGTAGCGATTGCGTC
GCATGACGGAGGGAAACAAGCATTGGAGACTGTCCAACGGCTCCTTCCCGTGTTGTGTCAAGCCC
ACGGTTTGACGCCTGCACAAGTGGTCGCCATCGCCTCCAATATTGGCGGTAAGCAGGCGCTGGAA
ACAGTACAGCGCCTGCTGCCTGTACTGTGCCAGGATCATGGACTGACCCCAGACCAGGTAGTCGC
AATCGCGTCACATGACGGGGGAAAGCAAGCCCTGGAAACCGTGCAAAGGTTGTTGCCGGTCCTTT
GTCAAGACCACGGCCTTACACCGGAGCAAGTCGTGGCCATTGCATCCCACGACGGTGGCAAACA
GGCTCTTGAGACGGTTCAGAGACTTCTCCCAGTTCTCTGTCAAGCCCACGGGCTGACTCCCGATCA
AGTTGTAGCGATTGCGTCCAACGGTGGAGGGAAACAAGCATTGGAGACTGTCCAACGGCTCCTTC
CCGTGTTGTGTCAAGCCCACGGTTTGACGCCTGCACAAGTGGTCGCCATCGCCAACAACAACGGC
GGTAAGCAGGCGCTGGAAACAGTACAGCGCCTGCTGCCTGTACTGTGCCAGGATCATGGACTGAC
CCCAGACCAGGTAGTCGCAATCGCGTCACATGACGGGGGAAAGCAAGCCCTGGAAACCGTGCAA
AGGTTGTTGCCGGTCCTTTGTCAAGACCACGGCCTTACACCGGAGCAAGTCGTGGCCATTGCAAG
CAACATCGGTGGCAAACAGGCTCTTGAGACGGTTCAGAGACTTCTCCCAGTTCTCTGTCAAGCCC
ACGGGCTGACTCCCGATCAAGTTGTAGCGATTGCGAATAACAATGGAGGGAAACAAGCATTGGA
GACTGTCCAACGGCTCCTTCCCGTGTTGTGTCAAGCCCACGGTTTGACGCCTGCACAAGTGGTCGC
CATCGCCAGCCATGATGGCGGTAAGCAGGCGCTGGAAACAGTACAGCGCCTGCTGCCTGTACTGT
GCCAGGATCATGGACTGACACCCGAACAGGTGGTCGCCATTGCTTCTAATGGGGGAGGACGGCC
AGCCTTGGAGTCCATCGTAGCCCAATTGTCCAGGCCCGATCCCGCGTTGGCTGCGTTAACGAATG
ACCATCTGGTGGCGTTGGCATGTCTTGGTGGACGACCCGCGCTCGATGCAGTCAAAAAGGGTCTG
CCTCATGCTCCCGCATTGATCAAAAGAACCAACCGGCGGATTCCCGAGAGAACTTCCCATCGAGT
CGCGGGATCCGGCAGCTACGCCCTGGGTCCGTATCAGATTAGCGCCCCGCAGCTGCCAGCT
TACAATGGTCAGACCGTGGGTACCTTCTACTATGTGAACGACGCGGGCGGTCTGGAGAGCA

[chemical structure]

[chemical structure]

[chemical structure]

[chemical structure]

[chemical structure]

Tranlated amino acid sequence:
(SEQ ID NO: 343)
PKKKRKVGIHRGVPMVDLRTLGYSQQQQEKIKPKVRSTVAQHHEALVGHGFTHAHIVALSQHPAAL
GTVAVKYQDMIAALPEATHEAIVGVGKQWSGARALEALLTVAGELRGPPLQLDTGQLLKIAKRGGV
TAVEAVHAWRNALTGAPLNLTPDQVVAIASNGGGKQALETVQRLLPVLCQDHGLTPEQVVAIASHD
GGKQALETVQRLLPVLCQAHGLTPDQVVAIASNIGGKQALETVQRLLPVLCQAHGLTPAQVVAIASN
GGGKQALETVQRLLPVLCQDHGLTPDQVVAIASNGGGKQALETVQRLLPVLCQDHGLTPEQVVAIAS
NIGGKQALETVQRLLPVLCQAHGLTPDQVVAIASHDGGKQALETVQRLLPVLCQAHGLTPAQVVAIA
SNIGGKQALETVQRLLPVLCQDHGLTPDQVVAIASHDGGKQALETVQRLLPVLCQDHGLTPEQVVAI
ASHDGGKQALETVQRLLPVLCQAHGLTPDQVVAIASNGGGKQALETVQRLLPVLCQAHGLTPAQVV
AIANNNGGKQALETVQRLLPVLCQDHGLTPDQVVAIASHDGGKQALETVQRLLPVLCQDHGLTPEQV
VAIASNIGGKQALETVQRLLPVLCQAHGLTPDQVVAIANNNGGKQALETVQRLLPVLCQAHGLTPAQ
VVAIASHDGGKQALETVQRLLPVLCQDHGLTPEQVVAIASNGGGRPALESIVAQLSRPDPALAALTND
HLVALACLGGRPALDAVKKGLPHAPALIKRTNRRIPERTSHRVAGSGSYALGPYQISAPOLPAYNGQT
VGTFYYVNDAGGLESKVFSSGGSGGSTNLSDIIEKETGKQLVIQESILMLPEEVEEVIGNKPESDILVHT
AYDESTDENVMLLTSDAPEYKPWAL VIQDSNGENKIKML

[chemical structure]

(SEQ ID NO: 344)
CCCAAGAAGAAGAGGAAGGTGGGCATTCACCGCGGGGTACCTATGGTGGACTTGAGGACACTCG
GTTATTCGCAACAGCAACAGGAGAAAATCAAGCCTAAGGTCAGGAGCACCGTCGCGCAACACCA
CGAGGCGCTTGTGGGGCATGGCTTCACTCATGCGCATATTGTCGCGCTTTCACAGCACCCTGCGG
CGCTTGGGACGGTGGCTGTCAAATACCAAGATATGATTGCGGCCCTGCCCGAAGCCACGCACGAG
GCAATTGTAGGGGTCGGTAAACAGTGGTCGGGAGCGCGAGCACTTGAGGCGCTGCTGACTGTGG
CGGGTGAGCTTAGGGGGCCTCCGCTCCAGCTCGACACCGGGCAGCTGCTGAAGATCGCGAAGAG
AGGGGGAGTAACAGCGGTAGAGGCAGTGCACGCCTGGCGCAATGCGCTCACCGGGGCCCCCTTG
AACCTGACCCCAGACCAGGTAGTCGCAATCGCGTCACATGACGGGGGAAAGCAAGCCCTGGAAA
CCGTGCAAAGGTTGTTGCCGGTCCTTTGTCAAGACCACGGCCTTACACCGGAGCAAGTCGTGGCC
ATTGCAAGCAATGGGGGTGGCAAACAGGCTCTTGAGACGGTTCAGAGACTTCTCCCAGTTCTCTG
TCAAGCCCACGGGCTGACTCCCGATCAAGTTGTAGCGATTGCGTCCAACGGTGGAGGGAAACAA
GCATTGGAGACTGTCCAACGGCTCCTTCCCGTGTTGTGTCAAGCCCACGGTTTGACGCCTGCACA
AGTGGTCGCCATCGCCAGCCATGATGGCGGTAAGCAGGCGCTGGAAACAGTACAGCGCCTGCTG
CCTGTACTGTGCCAGGATCATGGACTGACCCCAGACCAGGTAGTCGCAATCGCGTCACATGACGG
GGGAAAGCAAGCCCTGGAAACCGTGCAAAGGTTGTTGCCGGTCCTTTGTCAAGACCACGGCCTTA
CACCGGAGCAAGTCGTGGCCATTGCAAGCAACATCGGTGGCAAACAGGCTCTTGAGACGGTTCA
GAGACTTCTCCCAGTTCTCTGTCAAGCCCACGGGCTGACTCCCGATCAAGTTGTAGCGATTGCGA
ATAACAATGGAGGGAAACAAGCATTGGAGACTGTCCAACGGCTCCTTCCCGTGTTGTGTCAAGCC
CACGGTTTGACGCCTGCACAAGTGGTCGCCATCGCCTCCAATATTGGCGGTAAGCAGGCGCTGGA
AACAGTACAGCGCCTGCTGCCTGTACTGTGCCAGGATCATGGACTGACCCCAGACCAGGTAGTCG
CAATCGCGTCGAACATTGGGGGAAAGCAAGCCCTGGAAACCGTGCAAAGGTTGTTGCCGGTCCTT
TGTCAAGACCACGGCCTTACACCGGAGCAAGTCGTGGCCATTGCAAGCAATGGGGGTGGCAAAC
AGGCTCTTGAGACGGTTCAGAGACTTCTCCCAGTTCTCTGTCAAGCCCACGGGCTGACTCCCGATC
AAGTTGTAGCGATTGCGTCCAACGGTGGAGGGAAACAAGCATTGGAGACTGTCCAACGGCTCCTT
CCCGTGTTGTGTCAAGCCCACGGTTTGACGCCTGCACAAGTGGTCGCCATCGCCAACAACAACGG
CGGTAAGCAGGCGCTGGAAACAGTACAGCGCCTGCTGCCTGTACTGTGCCAGGATCATGGACTGA
CCCCAGACCAGGTAGTCGCAATCGCGTCGAACATTGGGGGAAAGCAAGCCCTGGAAACCGTGCA
AAGGTTGTTGCCGGTCCTTTGTCAAGACCACGGCCTTACACCGGAGCAAGTCGTGGCCATTGCAA
GCAATGGGGGTGGCAAACAGGCTCTTGAGACGGTTCAGAGACTTCTCCCAGTTCTCTGTCAAGCC
CACGGGCTGACTCCCGATCAAGTTGTAGCGATTGCGTCGAACATTGGAGGGAAACAAGCATTGG
AGACTGTCCAACGGCTCCTTCCCGTGTTGTGTCAAGCCCACGGTTTGACGCCTGCACAAGTGGTC
GCCATCGCCAGCCATGATGGCGGTAAGCAGGCGCTGGAAACAGTACAGCGCCTGCTGCCTGTACT
GTGCCAGGATCATGGACTGACACCCGAACAGGTGGTCGCCATTGCTTCTAATGGGGGAGGACGG
CCAGCCTTGGAGTCCATCGTAGCCCAATTGTCCAGGCCCGATCCCGCGTTGGCTGCGTTAACGAA
TGACCATCTGGTGGCGTTGGCATGTCTTGGTGGACGACCCGCGCTCGATGCAGTCAAAAAGGGTC
TGCCTCATGCTCCCGCATTGATCAAAAGAACCAACCGGCGGATTCCCGAGAGAACTTCCCATCGA
GTCGCGGGATCCCCAACCCCGTACCCAAACTATGCCAATGCCGGTCATGTGGAGGGTCAGAG
CGCCCTGTTCATGCGTGATAACGGCATCAGCGAGGGTCTGGTGTTCCACAACAACCCGGAA
GGCACCTGCGGTTTTTGCGTGAACATGACCGAGACCCTGCTGCCGGAAAACGCGAAAATGA
CCGTGGTGCCGCCGGAAGGTGCCATTCCAGTGAAGCGCGGCGCTACCGGTGAAACCAAAG

[chemical structure]

[chemical structure]

[chemical structure]

[chemical structure]

[chemical structure]

Translated amino acid sequence:
(SEQ ID NO: 345)
PKKKRKVGIHRGVPMVDLRTLGYSQQQQEKIKPKVRSTVAQHHEALVGHGFTHAHIVALSQHPAAL
GTVAVKYQDMIAALPEATHEAIVGVGKQWSGARALEALLTVAGELRGPPLQLDTGQLLKIAKRGGV
TAVEAVHAWRNALTGAPLNLTPDQVVAIASHDGGKQALETVQRLLPVLCQDHGLTPEQVVAIASNG
GGKQALETVQRLLPVLCQAHGLTPDQVVAIASNGGGKQALETVQRLLPVLCQAHGLTPAQVVAIASH
DGGKQALETVQRLLPVLCQDHGLTPDQVVAIASHDGGKQALETVQRLLPVLCQDHGLTPEQVVAIAS
NIGGKQALETVQRLLPVLCQAHGLTPDQVVAIANNNGGKQALETVQRLLPVLCQAHGLTPAQVVAIA
SNIGGKQALETVQRLLPVLCQDHGLTPDQVVAIASNIGGKQALETVQRLLPVLCQDHGLTPEQVVAIA
SNGGGKQALETVQRLLPVLCQAHGLTPDQVVAIASNGGGKQALETVQRLLPVLCQAHGLTPAQVVAI
ANNNGGKQALETVQRLLPVLCQDHGLTPDQVVAIASNIGGKQALETVQRLLPVLCQDHGLTPEQVVA
IASNGGGKQALETVQRLLPVLCQAHGLTPDQVVAIASNIGGKQALETVQRLLPVLCQAHGLTPAQVV
AIASHDGGKQALETVQRLLPVLCQDHGLTPEQVVAIASNGGGRPALESIVAQLSRPDPALAALTNDHL
VALACLGGRPALDAVKKGLPHAPALIKRTNRRIPERTSHRVAGSPTPYPNYANAGHVEGQSALFMRD
NGISEGLVFHNNPEGTCGFCVNMTETLLPENAKMTVVPPEGAIPVKRGATGETKVFTGNSNSPKSPTK
GGCSGGSTNLSDIIEKETGKQLVIQESILMLPEEVEEVIGNKPESDILVHTAYDESTDENVMLLTSDAPE
YKPWALVIQDSNGENKIKML

General DdCBE Architecture and mitoTALE Sequences

### Legend:

| | |
|---|---|
| COX8A MTS | COX8A MTS (Right)-Underlined |
| SOD2 MTS | SOD2 MTS (Left)-Bolded |
| 3xFLAG | [symbol] -Dashed Underlined |
| 3xHA | 3xHA (Left)-Italicized and Underlined |
| mitoTALE | mitoTALE-Bolded and Heavy Underlined |
| DddAₜₒₓ half | [symbol] -Bolded, Italicized, and Underlined |
| 1x-UGI1x-UGI | [symbol] -Thick Dashed Underlined |
| ATP5B 3′UTR | [symbol] -Dotted Underlined |
| SOD2 3′UTR | SOD2 3UTR (Left)-Double Underlined |

[0638] All right-side halves of DdCBEs have the general architecture of (from N- to C-terminus): COX8A MTS-3×FLAG-mitoTALE-2aa linker-DddAₜₒₓ half-4aa linker-1×-UGI-ATP5B 3′UTR

[0639] All left-side halves of DdCBEs have the general architecture of (from N- to C-terminus): SOD2 MTS-3×HA-mitoTALE-2aa linker-DddAₜₒₓ half-4aa linker-1×-UGI-SOD2 3′UTR

(A) SOD2 MTS
(SEQ ID NO: 13)
MLSRAVCGTSRQLAPVLGYLGSRQKHSLPD
(B) COX8A MTS
(SEQ ID NO: 14)
MSVLTPLLLRGLTGSARRLPVPRAKIHSL
(C) SOD2 3′UTR
(SEQ ID NO: 15)
ACCACGATCGTTATGCTGATCATACCCTAATGATCCCAGCAAGATAATGTCCTGTCTTCTAAGATG
TGCATCAAGCCTGGTACATACTGAAAACCCTATAAGGTCCTGGATAATTTTTGTTTGATTATTCAT
TGAAGAAACATTTATTTTCCAATTGTGTGAAGTTTTTGACTGTTAATAAAAGAATCTGTCAACCAT
CAAAAAAAAAAAAAAA
(D) ATP5B 3′UTR
(SEQ ID NO: 15)
ACCACGATCGTTATGCTGATCATACCCTAATGATCCCAGCAAGATAATGTCCTGTCTTCTAAGATG
TGCATCAAGCCTGGTACATACTGAAAACCCTATAAGGTCCTGGATAATTTTTGTTTGATTATTCAT
TGAAGAAACATTTATTTTCCAATTGTGTGAAGTTTTTGACTGTTAATAAAAGAATCTGTCAACCAT
CAAAAAAAAAAAAAAA
(E) ND6-DdCBE: Left mitoTALE-G1397-DddAₜₒₓ₋N-1x-UGI
(SEQ ID NO: 144)
ATGGCCCTGTCCCGTGCGGTTTGTGGCACCTCCCGTCAACTGGCTCCGGTTCTGGGTTATC
TGGGTTCCCGTCAAAAACACTCCCTGCCGGACTACCCGTATGATGTTCCGGATTACGCTGGCTAC
CCATACGACGTCCCAGACTACGCTGGCTACCCATACGACGTCCCAGACTACGCTATGGACATCGCGG
ATCTGCGTACCCTGGGTTACAGCCAGCAGCAGCAGGAGAAGATCAAGCCGAAGGTGCGCA
GCACCGTGGCTCAGCACCACGAAGCCCTGGTGGGCCACGGTTTCACCCACGCTCACATTGT
GGCCCTGAGCCAGCACCCAGCCGCGCTGGGCACCGTGGCCGTGAAATATCAGGATATGATT
GCTGCCCTGCCAGAGGCCACCCATGAAGCTATTGTGGGCGTGGGCAAGCAGTGGAGCGGT
GCTCGTGCGCTGGAGGCGCTGCTGACCGTGGCTGGTGAACTGCGTGGTCCGCCGCTGCAG
CTGGACACCGGTCAGCTGCTGAAAATCGCGAAACGTGGCGGTGTGACCGCGGTGGAAGCC
GTGCATGCTTGGCGTAATGCTCTGACCGGTGCGCCGCTGAACCTGACCCCGCAGCAGGTGG
TGGCTATTGCCAGCAACAACGGCGGTAAACAGGCCCTGGAGACCGTGCAGCGCCTGCTGCC
GGTGCTGTGCCAGGCCCATGGTCTGACCCCGGAGCAGGTGGTGGCGATCGCTAGCAACATC
GGCGGCAAGCAGGCCCTGGAAACCGTGCAGGCGCTGTTACCGGTGCTGTGCCAGGCTCAT
GGCCTGACCCCGGAACAAGTIGTGGCTATTGCCAGCCATGATGGCGGTAAACAGGCTCTGG
AAACCGTGCAGCGTCTGTTGCCGGTGCTGTGCCAAGCCCATGGCCTGACCCCGGAGCAAGT
TGTGGCTATTGCGAGCCATGATGGCGGCAAGCAGGCGCTGGAAACCGTTCAGCGCCTGTTA
CCGGTGCTGTGCCAAGCTCATGGTCTGACCCCGGAACAGGTGGTGGCCATTGCTTCCCATG
ATGGCGGTAAACAGGCCCTGGAAACCGTTCAGCGTCTGCTTCCGGTGCTGTGCCAGGCCCA
TGGGCTGACCCCGGAACAAGTGGTTGCTATTGCCAGCCACGATGGCGGCAAGCAGGCTCTG
GAGACCGTTCAGCGCCTGCTTCCGGTGCTGTGCCAGGCCCATGGCTTAACCCCGGAACAAG
TTGTTGCTATTGCTAGTCATGATGGCGGTAAACAGGCGCTGGAGACCGTTCAGCGTCTGTT
ACCGGTGCTGTGCCAGGCGCATGGCTTAACCCCGGAGCAGGTTGTTGCCATTGCCTCCAAT
ATCGGCGGCAAGCAGGCTCTGGAAACCGTTCAGGCCCTGTTGCCGGTGCTGTGCCAGGCCC
ATGGACTGACCCCGCAGCAAGTTGTTGCCATTGCCAGCAATGGCGGTGGCAAACAGGCGCT
GGAAACTGTTCAGCGCCTGCTCCCGGTGCTGTGCCAAGCGCATGGTCTGACCCCGCAGCAA
GTGGTTGCTATTGCTAGCAATGGTGGCGGTCGTCCGGCGCTGGAAAGCATTGTGGCTCAGC
TGAGCCGTCCAGACCCGGCCCTGGCGGCTCTGACCAACGATCACCTGGTGGCGCTGGCTTG
CCTGGGCGGTCGTCCGGCCCTGGATGCGGTGAAGAAAGGCCTGGGTGGATCCGGCAGCTAC
GCCCTGGGTCCGTATCAGATTAGCGCCCCGCAGCTGCCAGCTTACAATGGTCAGACCGTGGGTACC
TTCTACTATGTGAACGACGCGGGCGGTCTGGAGAGCAAGGTGTTTAGCAGCGGCGGTCCAACCCCG
TACCCAAACTATGCCAATGCCGGTCATGTGGAGGGTCAGAGCGCCCTGTTCATGCGTGATAACGGC
ATCAGCGAGGGTCTGGTGTTCCACAACAACCCGGAAGGCACCTGCGGTTTTTGCGTGAACATGACC

[chemical structure]

[chemical structure]

[chemical structure]

[chemical structure]

[chemical structure]

(F) ND6-DdCBE: Right mitoTALE-G1397-DddAₜₒₓ₋N-1x-UGI
TCCGTTCTGACCCCGCTGCTGCTGCGTGGCCTGACCGGCTCCGCTCGTCGTCTGCCAGTTCCGCGT

[chemical structure]

[chemical structure]

AGCAGGAGAAGATCAAGCCAAAGGTGCGCAGCACCGTGGCCCAGCACCATGAAGCTCTGG
TGGGTCACGGCTTCACCCACGCGCACATCGTGGCTCTGAGCCAGCACCCAGCCGCGCTGGG
ATTGTGGGTGTGGGCAAGAGAGGAGCCGGTGCTCGTCTGCGCTGGAGGCCCTGCTGACCGTG
GCCGGTGAACTGCGTGGCCCGCCGCTGCAGCTGGATACCGGCCAGCTGCTGAAAATCGCG
AAACGTGGCGGTGTGACCGCTGTGGAAGCTGTGCATGCCTGGCGTAATGCTCTGACCGGTG
CCCCGCTGAACCTGACCCCGCAGCAGGTGGTGGCTATTGCCAGCAACAACGGCGGTAAACA
GAGCAGGTGGTGGCGATCGCTAGCAACATCGGCGGCAAGCAGGCTCTGGAGACCGTTCAG
CCAGCAATGGCGGTGGCAAACAGGCGCTGGAGACCGTGCAGCGTCTGTTGCCGGTGCTGT
GCCAAGCCCATGGGCTGACCCCGCAGCAAGTGGTTGCCATCGCCAGCAACAACGGTGGCAA
GCAGGCCCTGGAGACCGTTCAGCGCCTGTTACCGGTGCTGTGCCAGGCCCATGGCTTAACC
CCGCAGCAAGTTGTGGCCATCGCTAGCAACAACGGTGGCAAACAGGCTCTGGAGACTGTTC
AGCGTCTGCTTCCGGTGCTGTGCCAAGCGCATGGCCTGACCCCGGAACAAGTTGTTGCTAT
TGCCAGCCATGATGGTGGCAAGCAGGCGCTGGAAACCGTTCAGCGCCTGCTTCCGGTGCTG
TGCCAGGCGCATGGATTAACCCCGCAGCAAGTGGTGGCCATCGCCAGCAATGGTGGCGGTA
AACAGGCCCTGGAAACCGTTCAGCGTCTGTTACCGGTGCTGTGCCAGGCCCATGGATTAAC
CCCGGAACAAGTTGTGGCTATTGCGTCCAATATCGGCGGCAAGCAGGCGCTGGAAACTGTG
CAGGCTCTGCTCCCGGCCTGTGCCAGGCCCATGGGTTAACCCCGCAGCAGGTTGTTGCCA
TTGCGAGCAACGGCGGTGGCAAACAGGCTCTGGAGACGGTTCAGCGCCTGCTCCCGTGCT
GTGCCAGGCCCATGGTTTAACCCCGCAGCAGGTGGTTGCTATTGCTAGCAATGGCGGCGGC
AAGCAGGCGCTGGAAACGGTGCAGCGTCTGCTACCGGTGCTGTGCCAGGCACATGGCCTTA
CCCCGCAGCAAGTTGTGGCCATTGCTAGCAATGGCGGTGGCCGTCCGGCCCTGGAAAAGCAT
TGTGGCGCAGCTGAGCCGTCCAGACCCGGCCCTGGCGGCTCTGACCAATGATCACCTGGTG
GCCCTGGCCTGCCTGGGTGGCCGTCCGGCTCTGGATGCCGTGAAGAAAGGTCTGGGCGGAT
CCGCCATTCCAGTGAAGCGCGGCGCTACCGGTGAAACCAAAGTGTTTACCGGTAACAGCAACAGCC

[chemical structure]

[chemical structure]

[chemical structure]

[chemical structure]

[chemical structure]

[chemical structure]

[chemical structure]

(G) ND1-DdCBE Right mitoTALE repeat
(SEQ ID NO: 146)
GACATCGCGGATCTGCGTACCCTGGGTTACAGCCAGCAGCAGCAGGAGAAGATCAAGCCAAAGG
TGCGCAGCACCGTGGCCCAGCACCATGAAGCTCTGGTGGGTCACGGCTTCACCCACGCGCACATC
GTGGCTCTGAGCCAGCACCCAGCCGCGCTGGGTACCGTGGCCGTGAAATATCAGGACATGATTGC
TGCCCTGCCAGAGGCTACCCATGAAGCGATTGTGGGTGTGGGCAAGCAGTGGAGCGGTGCTCGTG
CGCTGGAGGCCCTGCTGACCGTGGCCGGTGAACTGCGTGGCCCGCCGCTGCAGCTGGATACCGGC
CAGCTGCTGAAAATCGCGAAACGTGGCGGTGTGACCGCTGTGGAAGCTGTGCATGCCTGGCGTAA
TGCTCTGACCGGTGCCCCGCTGAACCTGACCCCGGAACAGGTGGTTGCCATCGCATCCAATAATG
GTGGTAAACAAGCTCTGGAGACCGTTCAAGCCCTGCTGCCAGTGCTGTGCCAGGCTCATGGTCTG
ACCCCGCAGCAAGTTGTGGCTATTGCCAGCAACATCGGCGGCAAGCAGGCCCTGGAGACCGTGC
AGCGTCTGCTGCCGGTGCTGTGCCAGGCCCATGGCCTGACCCCGCAGCAAGTGGTTGCTATCGCC
AGCAACAACGGCGGTAAACAGGCTCTGGAAACCGTGCAGCGCCTGTTACCGGTGCTGTGCCAAG
CCCATGGTCTGACCCCGGAGCAGGTGGTGGCGATTGCTAGCAACGGCGGTGGCAAGCAGGCTCT
GGAGACCGTTCAGGCCCTGCTTCCGGTGCTGTGCCAAGCGCATGGCCTGACCCCGGAACAAGTTG
TTGCCATTGCCAGCAATGGTGGCGGTAAACAGGCGCTGGAAACCGTGCAGGCTCTGTTACCGGTG
CTGTGCCAGGCCCATGGGCTGACCCCGGAGCAAGTGGTGGCTATTGCGAGCAATGGCGGTGGCA
AGCAGGCCCTGGAAACCGTGCAGGCGCTGTTGCCGGTGCTGTGCCAAGCCCATGGATTAACCCCG
GAACAAGTGGTGGCGATCGCTAGCAACAACGGTGGCAAACAGGCGCTGGAGACCGTTCAGCGTC
TGTTACCGGTGCTGTGCCAGGCGCATGGCTTAACCCCGGAACAGGTTGTTGCGATTGCCAGCAAC
ATTGGTGGCAAGCAGGCTCTGGAAACCGTTCAGGCCCTGCTCCCGGTGCTGTGCCAGGCCCATGG
TTTAACCCCGGAACAGGTGGTGGCCATTGCCAGCAACGGTGGCGGTAAACAGGCCCTGGAGACC
GTTCAGCGCCTGCTACCGGTGCTGTGCCAGGCCCATGGACTGACCCCGGAGCAAGTTGTTGCCAT
TGCTAGCAACAACGGCGGCAAGCAGGCGCTGGAGACCGTGCAGGCTCTGCTTCCGGTGCTGTGCC
AGGCCCATGGGTTAACCCCGGAGCAGGTTGTGGCCATCGCCAGCCACGACGGCGGTAAACAGGC
CCTGGAAACCGTTCAGGCGCTGCTACCGGTGCTGTGCCAGGCACATGGCTTAACCCCGGAGCAGG
TGGTTGCCATCGCCTCCAATGGCGGTGGCAAGCAGGCTCTGGAAACGGTGCAGGCCCTGCTGCCG
GTGCTGTGCCAAGCCCATGGGTTGACCCCGGAACAAGTGGTGGCTATTGCTAGCCACGACGGTGG
CAAACAGGCTCTGGAGACTGTTCAGCGTCTGCTTCCGGTGCTGTGCCAGGCTCATGGCTTAACCC
CGCAGCAAGTTGTTGCTATTGCCTCCAATATTGGTGGCAAGCAGGCGCTGGAAACCGTTCAGCGC
CTGCTGCCGGTGCTGTGCCAGGCTCATGGGCTTACCCCGGAACAAGTTGTGGCCATTGCCTCCCAT
GATGGTGGCAAACAGGCGCTGGAAACTGTGCAGGCTCTGCTCCCGGTGCTGTGCCAGGCTCATGG
ATTAACCCCGCAGCAAGTGGTGGCCATTGCTAGCCACGATGGTGGCAAGCAGGCCCTGGAGACG
GTTCAGCGTCTGCTCCCGGTGCTGTGCCAGGCCCATGGGCTAACCCCGCAGCAGGTTGTTGCTATT
GCCAGTCATGATGGTGGCAAACAGGCTCTGGAAACTGTGCAGCGCCTGCTACCGGTGCTGTGCCA
GGCTCACGGTCTGACCCCGCAGCAGGTGGTGGCAATCGCAAGCAACGGTGGTGGTCGTCCGGCA
CTGGAAAGCATTGTGGCGCAGCTGAGCCGTCCAGACCCGGCCCTGGCGGCTCTGACCAATGATCA
CCTGGTGGCCCTGGCCTGCCTGGGTGGCCGTCCGGCTCTGGATGCCGTGAAGAAAGGTCTGGGC
Translated amino acid sequence:
(SEQ ID NO: 147)
DIADLRTLGYSQQQQEKIKPKVRSTVAQHHEALVGHGFTHAHIVALSQHPAALGTVAVKYQDMIAAL
PEATHEAIVGVGKQWSGARALEALLTVAGELRGPPLQLDTGQLLKIAKRGGVTAVEAVHAWRNALT
GAPLNLTPEQVVAIASNNGGKQALETVQALLPVLCQAHGLTPQQVVAIASNIGGKQALETVQRLLPVL
CQAHGLTPQQVVAIASNNGGKQALETVQRLLPVLCQAHGLTPEQVVAIASNGGGKQALETVQALLPV
LCQAHGLTPEQVVAIASNGGGKQALETVQALLPVLCQAHGLTPEQVVAIASNGGGKQALETVQALLP
VLCQAHGLTPEQVVAIASNNGGKQALETVQRLLPVLCQAHGLTPEQVVAIASNIGGKQALETVQALL
PVLCQAHGLTPEQVVAIASNGGGKQALETVQRLLPVLCQAHGLTPEQVVAIASNNGGKQALETVQAL
LPVLCQAHGLTPEQVVAIASHDGGKQALETVQALLPVLCQAHGLTPEQVVAIASNGGGKQALETVQA
LLPVLCQAHGLTPEQVVAIASHDGGKQALETVQRLLPVLCQAHGLTPQQVVAIASNIGGKQALETVQ
RLLPVLCQAHGLTPEQVVAIASHDGGKQALETVQALLPVLCQAHGLTPQQVVAIASHDGGKQALETV
QRLLPVLCQAHGLTPQQVVAIASHDGGKQALETVQRLLPVLCQAHGLTPQQVVAIASNGGGRPALESI
VAQLSRPDPALAALTNDHLVALACLGGRPALDAVKKGLG
(H) ND1-DdCBE Left mitoTALE repeat
(SEQ ID NO: 148)
GACATCGCGGATCTGCGTACCCTGGGTTACAGCCAGCAGCAGCAGGAGAAGATCAAGCCGAAGG
TGCGCAGCACCGTGGCTCAGCACCACGAAGCCCTGGTGGGCCACGGTTTCACCCACGCTCACATT
GTGGCCCTGAGCCAGCACCCAGCCGCGCTGGGCACCGTGGCCGTGAAATATCAGGATATGATTGC
TGCCCTGCCAGAGGCCACCCATGAAGCTATTGTGGGCGTGGGCAAGCAGTGGAGCGGTGCTCGTG
CGCTGGAGGCGCTGCTGACCGTGGCTGGTGAACTGCGTGGTCCGCCGCTGCAGCTGGACACCGGT
CAGCTGCTGAAAATCGCGAAACGTGGCGGTGTGACCGCGGTGGAAGCCGTGCATGCTTGGCGTA
ATGCTCTGACCGGTGCGCCGCTGAACCTGACCCCGGAACAAGTGGTTGCTATCGCATCCCATGAC
GGCGGTAAACAAGCCCTGGAGACCGTTCAAGCCCTGCTGCCAGTGCTGTGCCAGGCTCATGGTCT
GACCCCGCAGCAGGTGGTGGCTATTGCCAGCAATGGCGGTGGCAAGCAGGCGCTGGAGACCGTG
CAGCGTCTGCTGCCGGTGCTGTGCCAAGCCCATGGCCTGACCCCGCAGCAAGTTGTGGCTATCGC
CAGCAACATTGGTGGCAAACAGGCCCTGGAAACCGTGCAGCGCCTGTTACCGGTGCTGTGCCAGG
CCCATGGTCTGACCCCGGAGCAGGTGGTGGCGATCGCTAGCAACAACGGTGGCAAGCAGGCTCT
GGAAACCGTGCAGGCCCTGCTTCCGGTGCTGTGCCAGGCCCATGGGCTGACCCCGGAACAAGTTG
TGGCTATTGCCAGCCACGACGGTGGCAAACAGGCGCTGGAAACCGTGCAGGCTCTGTTACCGGTG
CTGTGCCAAGCGCATGGCCTGACCCCGGAACAGGTGGTGGCTATTGCTAGCCACGATGGTGGCAA
GCAGGCCCTGGAGACCGTTCAGGCGCTGTTGCCGGTGCTGTGCCAGGCGCATGGCTTAACCCCGG
AACAAGTTGTTGCGATTGCTAGCAACGGTGGCGGTAAACAGGCTCTGGAGACCGTTCAGCGTCTG
TTACCGGTGCTGTGCCAGGCACATGGCCTGACCCCGGAGCAAGTTGTTGCCATTGCCAGCAACAT
CGGCGGCAAGCAGGCTCTGGAGACCGTGCAGGCCCTGCTCCCGGTGCTGTGCCAGGCCCATGGCT
TAACCCCGGAGCAAGTTGTGGCCATTGCCAGCAACAACGGCGGTAAACAGGCGCTGGAGACCGT
TCAGCGCCTGCTACCGGTGCTGTGCCAGGCTCATGGCTTGACCCCGGAACAGGTTGTTGCGATTG
CGAGCCATGATGGCGGCAAGCAGGCGCTGGAAACCGTTCAGGCTCTGCTTCCGGTGCTGTGCCAG
GCCCATGGATTAACCCCGGAGCAGGTTGTTGCTATTGCCAGCCATGATGGCGGTAAACAGGCCCT
GGAGACCGTGCAGGCGCTGCTACCGGTGCTGTGCCAGGCTCATGGGCTGACCCCGGAGCAAGTG
GTTGCTATCGCGAGCAACAATGGCGGCAAGCAGGCTCTGGAAACGGTGCAGGCCCTGCTGCCGG
TGCTGTGCCAGGCCCATGGGTTAACCCCGGAACAAGTGGTGGCCATCGCTAGCAACGGCGGTGGC
AAACAGGCCCTGGAGACTGTTCAGCGTCTGCTTCCGGTGCTGTGCCAGGCCCATGGGCTAACCCC
GCAGCAAGTGGTTGCCATTGCCAGCAATGGCGGCGGCAAGCAGGCTCTGGAAACTGTGCAGCGC
CTGCTGCCGGTGCTGTGCCAGGCTCACGGTCTGACCCCGCAACAGGTGGTGGCAATCGCAAGCAA
TGGTGGTGGTCGTCCGGCACTGGAGAGCATTGTGGCTCAGCTGAGCCGTCCAGACCCGGCCCTGG
CGGCTCTGACCAACGATCACCTGGTGGCGCTGGCTTGCCTGGGCGGTCGTCCGGCCCTGGATGCG
GTGAAGAAAGGCCTGGGT
Translated amino acid sequence:
(SEQ ID NO: 149)
DIADLRTLGYSQQQQEKIKPKVRSTVAQHHEALVGHGFTHAHIVALSQHPAALGTVAVKYQDMIAAL
PEATHEAIVGVGKQWSGARALEALLTVAGELRGPPLQLDTGQLLKIAKRGGVTAVEAVHAWRNALT
GAPLNLTPEQVVAIASHDGGKQALETVQALLPVLCQAHGLTPQQVVAIASNGGGKQALETVQRLLPV
LCQAHGLTPQQVVAIASNIGGKQALETVQRLLPVLCQAHGLTPEQVVAIASNNGGKQALETVQALLP
VLCQAHGLTPEQVVAIASHDGGKQALETVQALLPVLCQAHGLTPEQVVAIASHDGGKQALETVQALL
PVLCQAHGLTPEQVVAIASNGGGKQALETVQRLLPVLCQAHGLTPEQVVAIASNIGGKQALETVQAL
LPVLCQAHGLTPEQVVAIASNNGGKQALETVQRLLPVLCQAHGLTPEQVVAIASHDGGKQALETVQA
LLPVLCQAHGLTPEQVVAIASHDGGKQALETVQALLPVLCQAHGLTPEQVVAIASNNGGKQALETVQ
ALLPVLCQAHGLTPEQVVAIASNGGGKQALETVQRLLPVLCQAHGLTPQQVVAIASNGGGKQALETV
QRLLPVLCQAHGLTPQQVVAIASNGGGRPALESIVAQLSRPDPALAALTNDHLVALACLGGRPALDA
VKKGLG
(I) ND2-DdCBE Right mitoTALE repeat
(SEQ ID NO: 150)
GACATCGCGGATCTGCGTACCCTGGGTTACAGCCAGCAGCAGCAGGAGAAGATCAAGCCAAAGG
TGCGCAGCACCGTGGCCCAGCACCATGAAGCTCTGGTGGGTCACGGCTTCACCCACGCGCACATC
GTGGCTCTGAGCCAGCACCCAGCCGCGCTGGGTACCGTGGCCGTGAAATATCAGGACATGATTGC
TGCCCTGCCAGAGGCTACCCATGAAGCGATTGTGGGTGTGGGCAAGCAGTGGAGCGGTGCTCGTG
CGCTGGAGGCCCTGCTGACCGTGGCCGGTGAACTGCGTGGCCCGCCGCTGCAGCTGGATACCGGC
CAGCTGCTGAAAATCGCGAAACGTGGCGGTGTGACCGCTGTGGAAGCTGTGCATGCCTGGCGTAA
TGCTCTGACCGGTGCCCCGCTGAACCTGACCCCGGAACAAGTGGTTGCCATCGCATCCAATATCG
GTGGTAAACAAGCCCTGGAGACCGTTCAAGCCCTGCTGCCAGTGCTGTGCCAGGCTCATGGTCTG
ACCCCGCAGCAGGTGGTGGCCATTGCGAGCAACAATGGCGGCAAGCAGGCGCTGGAGACCGTGC
AGCGTCTGCTGCCGGTGCTGTGCCAAGCCCATGGCCTGACCCCGCAGCAAGTGGTTGCTATCGCC
AGCAACATTGGCGGTAAACAGGCCCTGGAAACCGTGCAGCGCCTGTTACCGGTGCTGTGCCAGGC
CCATGGTCTGACCCCGGAGCAGGTGGTGGCGATCGCTAGCAACATCGGCGGCAAGCAGGCTCTG
GAAACCGTGCAGGCCCTGCTTCCGGTGCTGTGCCAGGCCCATGGGCTGACCCCGGAACAAGTTGT
GGCTATTGCCAGCCATGATGGCGGTAAACAGGCGCTGGAAACCGTGCAGGCTCTGTTACCGGTGC
TGTGCCAAGCGCATGGCCTGACCCCGGAACAGGTGGTGGCTATTGCGAGCAATGGCGGTGGCAA
GCAGGCCCTGGAGACCGTTCAGGCGCTGTTGCCGGTGCTGTGCCAGGCGCATGGCTTAACCCCGG
AACAAGTTGTTGCGATCGCTAGCAACAACGGTGGCAAACAGGCTCTGGAGACCGTTCAGCGTCTG
TTACCGGTGCTGTGCCAGGCACATGGCCTGACCCCGGAGCAAGTTGTTGCCATTGCCAGCCACGA
TGGTGGCAAGCAGGCTCTGGAGACCGTGCAGGCCCTGCTCCCGGTGCTGTGCCAGGCCCATGGCT
TAACCCCGGAGCAAGTIGTGGCTATCGCCAGCAACGGTGGCGGTAAACAGGCGCTGGAGACCGT
TCAGCGCCTGCTACCGGTGCTGTGCCAGGCTCATGGCTTGACCCCGGAACAGGTTGTTGCCATTG
CGTCCAATATCGGCGGCAAGCAGGCGCTGGAAACCGTTCAGGCTCTGCTTCCGGTGCTGTGCCAG
GCCCATGGATTAACCCCGGAGCAGGTTGTGGCGATTGCGAGCAACGGCGGTGGCAAACAGGCCC
TGGAGACCGTGCAGGCGCTGCTACCGGTGCTGTGCCAGGCTCATGGGCTGACCCCGGAGCAAGTG
GTTGCTATTGCTAGCAATGGCGGCGGCAAGCAGGCTCTGGAAACGGTGCAGGCCCTGCTGCCGGT
GCTGTGCCAGGCCCATGGGTTAACCCCGGAACAAGTGGTGGCCATCGCTTCCAATATTGGCGGTA
AACAGGCCCTGGAGACTGTTCAGCGTCTGCTTCCGGTGCTGTGCCAGGCCCATGGGCTAACCCCG
CAGCAAGTTGTTGCTATTGCCTCCAATGGCGGTGGCAAGCAGGCTCTGGAAACTGTGCAGCGCCT
GCTGCCGGTGCTGTGCCAGGCTCACGGCCTGACCCCGCAGCAAGTTGTGGCAATCGCAAGCAATG
GTGGTGGTCGTCCGGCTCTGGAGAGCATTGTGGCGCAGCTGAGCCGTCCAGACCCGGCCCTGGCG
GCTCTGACCAATGATCACCTGGTGGCCCTGGCCTGCCTGGGTGGCCGTCCGGCTCTGGATGCCGT
GAAGAAAGGTCTGGGC
Translated amino acid sequence:
(SEQ ID NO: 151)
DIADLRTLGYSQQQQEKIKPKVRSTVAQHHEALVGHGFTHAHIVALSQHPAALGTVAVKYQDMIAAL
PEATHEAIVGVGKQWSGARALEALLTVAGELRGPPLQLDTGQLLKIAKRGGVTAVEAVHAWRNALT
GAPLNLTPEQVVAIASNIGGKQALETVQALLPVLCQAHGLTPQQVVAIASNNGGKQALETVQRLLPVL
CQAHGLTPQQVVAIASNIGGKQALETVQRLLPVLCQAHGLTPEQVVAIASNIGGKQALETVQALLPVL
CQAHGLTPEQVVAIASHDGGKQALETVQALLPVLCQAHGLTPEQVVAIASNGGGKQALETVQALLPV
LCQAHGLTPEQVVAIASNNGGKQALETVQRLLPVLCQAHGLTPEQVVAIASHDGGKQALETVQALLP
VLCQAHGLTPEQVVAIASNGGGKQALETVQRLLPVLCQAHGLTPEQVVAIASNIGGKQALETVQALL
PVLCQAHGLTPEQVVAIASNGGGKQALETVQALLPVLCQAHGLTPEQVVAIASNGGGKQALETVQAL
LPVLCQAHGLTPEQVVAIASNIGGKQALETVQRLLPVLCQAHGLTPQQVVAIASNGGGKQALETVQR
LLPVLCQAHGLTPQQVVAIASNGGGRPALESIVAQLSRPDPALAALTNDHLVALACLGGRPALDAVK
KGLG
(J) ND2-DdCBE Left mitoTALE repeat
(SEQ ID NO: 152)
GACATCGCGGATCTGCGTACCCTGGGTTACAGCCAGCAGCAGCAGGAGAAGATCAAGCCAAAGG
TGCGCAGCACCGTGGCCCAGCACCATGAAGCTCTGGTGGGTCACGGCTTCACCCACGCGCACATC
GTGGCTCTGAGCCAGCACCCAGCCGCGCTGGGTACCGTGGCCGTGAAATATCAGGACATGATTGC
TGCCCTGCCAGAGGCTACCCATGAAGCGATTGTGGGTGTGGGCAAGCAGTGGAGCGGTGCTCGTG
CGCTGGAGGCCCTGCTGACCGTGGCCGGTGAACTGCGTGGCCCGCCGCTGCAGCTGGATACCGGC
CAGCTGCTGAAAATCGCGAAACGTGGCGGTGTGACCGCTGTGGAAGCTGTGCATGCCTGGCGTAA
TGCTCTGACCGGTGCCCCGCTGAACCTGACCCCGGAACAAGTGGTGGCTATCGCGTCCCATGATG
GTGGTAAACAGGCTCTGGAGACCGTGCAAGCTCTGCTGCCAGTGCTGTGCCAGGCCCATGGTCTG
ACCCCGCAGCAGGTGGTGGCTATTGCCAGCAATGGCGGTGGCAAGCAGGCGCTGGAGACCGTGC
AGCGTCTGCTGCCGGTGCTGTGCCAGGCTCATGGCCTGACCCCGCAGCAAGTTGTGGCTATTGCC
AGCAACGGTGGCGGTAAACAGGCCCTGGAGACCGTGCAGCGCCTGTTACCGGTGCTGTGCCAAG
CCCATGGCCTGACCCCGGAGCAGGTGGTGGCGATCGCTAGCAACATCGGCGGCAAGCAGGCTCT
GGAAACCGTGCAGGCCCTGCTTCCGGTGCTGTGCCAGGCCCATGGCTTAACCCCGGAACAGGTTG
TTGCTATTGCCAGCAACAACGGCGGTAAACAGGCGCTGGAAACCGTGCAGGCTCTGTTACCGGTG
CTGTGCCAGGCCCATGGGCTGACCCCGGAACAAGTTGTGGCTATTGCGAGCCATGATGGCGGCAA
GCAGGCCCTGGAAACCGTGCAGGCGCTGTTGCCGGTGCTGTGCCAAGCCCATGGATTAACCCCGG
AACAAGTTGTTGCGATCGCTAGCAACATTGGCGGTAAACAGGCTCTGGAAACCGTTCAGCGTCTG
TTACCGGTGCTGTGCCAGGCGCATGGTCTGACCCCGGAACAGGTTGTGGCCATTGCCTCCAATGG
CGGTGGCAAGCAGGCTCTGGAGACCGTTCAGGCCCTGCTCCCGGTGCTGTGCCAAGCGCATGGCC
TGACCCCGGAACAGGTGGTGGCTATCGCCAGCAACATTGGTGGCAAACAGGCGCTGGAGACCGT
TCAGCGCCTGCTACCGGTGCTGTGCCAGGCACATGGTCTGACCCCGGAGCAAGTTGTGGCCATTG
CTAGCCACGATGGTGGCAAGCAGGCGCTGGAAACCGTTCAGGCTCTGCTTCCGGTGCTGTGCCAG
GCCCATGGTTTAACCCCGGAACAAGTGGTTGCCATTGCGTCCAATGGTGGCGGTAAACAGGCCCT
GGAAACCGTTCAGGCGCTGCTACCGGTGCTGTGCCAGGCTCATGGGCTGACCCCGGAGCAAGTGG
TTGCTATTGCTTCCCATGATGGCGGCAAGCAGGCTCTGGAAACGGTGCAGGCCCTGCTGCCGGTG
CTGTGCCAAGCCCATGGGTTAACCCCGGAACAGGTGGTTGCGATTGCTAGCCACGACGGCGGTAA
ACAGGCCCTGGAAACGGTTCAGCGTCTGCTTCCGGTGCTGTGCCAGGCCCATGGACTTACCCCGC
AGCAGGTTGTGGCGATTGCCTCCAATGGCGGTGGCAAGCAGGCTCTGGAAACTGTGCAGCGCCTG
CTGCCGGTGCTGTGCCAGGCTCATGGTTTAACCCCGGAGCAGGTTGTTGCCATCGCCAGCCACGA
CGGTGGCAAACAGGCGCTGGAAACTGTGCAGGCTCTGCTCCCGGTGCTGTGCCAGGCTCATGGAC
TTACCCCGGAGCAGGTGGTTGCCATTGCTAGCAACATTGGTGGCAAGCAGGCCCTGGAGACTGTT
CAGGCGCTGTTACCGGTGCTGTGCCAGGCCCATGGGTTAACCCCGGAGCAAGTTGTTGCCATTGC
CTCCAATATTGGTGGCAAACAGGCTCTGGAGACTGTTCAGGCCCTGCTGCCGGTGCTGTGCCAGG
CTCACGGTCTGACCCCGCAGCAAGTGGTGGCAATCGCAAGCAATGGTGGTGGTCGTCCGGCTCTG
GAGAGCATTGTGGCGCAGCTGAGCCGTCCAGACCCGGCCCTGGCGGCTCTGACCAATGATCACCT
GGTGGCCCTGGCCTGCCTGGGTGGCCGTCCGGCTCTGGATGCCGTGAAGAAAGGTCTGGGC
Translated amino acid sequence:
(SEQ ID NO: 151)
DIADLRTLGYSQQQQEKIKPKVRSTVAQHHEALVGHGFTHAHIVALSQHPAALGTVAVKYQDMIAAL
PEATHEAIVGVGKQWSGARALEALLTVAGELRGPPLQLDTGQLLKIAKRGGVTAVEAVHAWRNALT
GAPLNLTPEQVVAIASNIGGKQALETVQALLPVLCQAHGLTPQQVVAIASNNGGKQALETVQRLLPVL
CQAHGLTPQQVVAIASNIGGKQALETVQRLLPVLCQAHGLTPEQVVAIASNIGGKQALETVQALLPVL
CQAHGLTPEQVVAIASHDGGKQALETVQALLPVLCQAHGLTPEQVVAIASNGGGKQALETVQALLPV
LCQAHGLTPEQVVAIASNNGGKQALETVQRLLPVLCQAHGLTPEQVVAIASHDGGKQALETVQALLP
VLCQAHGLTPEQVVAIASNGGGKQALETVQRLLPVLCQAHGLTPEQVVAIASNIGGKQALETVQALL
PVLCQAHGLTPEQVVAIASNGGGKQALETVQALLPVLCQAHGLTPEQVVAIASNGGGKQALETVQAL
LPVLCQAHGLTPEQVVAIASNIGGKQALETVQRLLPVLCQAHGLTPQQVVAIASNGGGKQALETVQR
LLPVLCQAHGLTPQQVVAIASNGGGRPALESIVAQLSRPDPALAALTNDHLVALACLGGRPALDAVK
KGLG
(K) ND4-DdCBE Right mitoTALE repeat
(SEQ ID NO: 153)
GACATCGCGGATCTGCGTACCCTGGGTTACAGCCAGCAGCAGCAGGAGAAGATCAAGCCAAAGG
TGCGCAGCACCGTGGCCCAGCACCATGAAGCTCTGGTGGGTCACGGCTTCACCCACGCGCACATC
GTGGCTCTGAGCCAGCACCCAGCCGCGCTGGGTACCGTGGCCGTGAAATATCAGGACATGATTGC
TGCCCTGCCAGAGGCTACCCATGAAGCGATTGTGGGTGTGGGCAAGCAGTGGAGCGGTGCTCGTG
CGCTGGAGGCCCTGCTGACCGTGGCCGGTGAACTGCGTGGCCCGCCGCTGCAGCTGGATACCGGC
CAGCTGCTGAAAATCGCGAAACGTGGCGGTGTGACCGCTGTGGAAGCTGTGCATGCCTGGCGTAA
TGCTCTGACCGGTGCCCCGCTGAACCTGACCCCGGAACAAGTGGTTGCGATTGCGTCCCATGATG
GTGGTAAACAAGCCCTGGAGACCGTTCAAGCTCTGCTGCCAGTGCTGTGCCAGGCTCATGGTCTG
ACCCCGCAGCAGGTGGTGGCTATTGCCAGCCATGATGGCGGCAAGCAGGCTCTGGAGACCGTGC
AGCGTCTGCTGCCGGTGCTGTGCCAAGCCCATGGCCTGACCCCGCAGCAAGTTGTGGCTATTGCC
AGCAACGGCGGTGGCAAACAGGCGCTGGAAACCGTGCAGCGCCTGTTACCGGTGCTGTGCCAAG
CGCATGGTCTGACCCCGGAGCAGGTGGTGGCCATCGCTAGCAACAACGGTGGCAAGCAGGCCCT
GGAAACCGTGCAGGCGCTGTTGCCGGTGCTGTGCCAGGCCCATGGCTTAACCCCGGAACAAGTGG
TGGCCATTGCGAGCAATGGTGGCGGTAAACAGGCTCTGGAAACCGTGCAGGCCCTGCTTCCGGTG
CTGTGCCAGGCCCATGGGCTGACCCCGGAACAAGTTGTGGCTATCGCCAGCAACATCGGCGGCAA
GCAGGCGCTGGAGACCGTTCAGGCTCTGTTACCGGTGCTGTGCCAGGCGCATGGCCTGACCCCGG
AACAGGTGGTGGCGATCGCTAGCAACATTGGCGGTAAACAGGCCCTGGAGACCGTTCAGCGCCT
GCTCCCGGTGCTGTGCCAGGCCCATGGTCTGACCCCGGAACAGGTTGTTGCTATTGCCAGCAACA
ACGGCGGCAAGCAGGCCCTGGAGACCGTGCAGGCGCTGCTACCGGTGCTGTGCCAGGCCCATGG
ACTGACCCCGGAGCAGGTTGTGGCCATCGCGTCCAATGGCGGTGGCAAACAGGCTCTGGAGACC
GTTCAGCGTCTGTTACCGGTGCTGTGCCAGGCACATGGCCTGACCCCGGAGCAAGTTGTTGCCAT
CGCTAGCAACATTGGTGGCAAGCAGGCGCTGGAAACCGTTCAGCGCCTGCTACCGGTGCTGTGCC
AGGCTCATGGCTTAACCCCGGAGCAGGTTGTCGCCATTGCCAGCAACAATGGTGGCAAACAGGCT
CTGGAAACTGTGCAGGCCCTGCTACCGGTGCTGTGCCAGGCCCATGGGTTAACCCCGGAACAGGT
TGTGGCCATTGCCTCCAATAACGGTGGCAAGCAGGCGCTGGAAACGGTGCAGGCTCTGCTTCCGG
TGCTGTGCCAGGCTCATGGGCTGACCCCGGAGCAAGTGGTTGCTATTGCGTCCAACATTGGTGGC
AAACAGGCCCTGGAAACCGTTCAGGCGCTGCTCCCGGTGCTGTGCCAGGCCCATGGGCTAACCCC
GGAACAGGTGGTTGCCATTGCCTCCAACAATGGTGGCAAGCAGGCCCTGGAAACGGTTCAGCGTC
TGCTTCCGGTGCTGTGCCAGGCCCATGGGCTTACCCCGCAGCAAGTTGTTGCTATCGCCAGCAAT
ATTGGTGGCAAACAGGCTCTGGAAACGGTGCAGCGCCTGCTACCGGTGCTGTGCCAGGCTCATGG
TTTAACCCCGCAGCAGGTGGTTGCGATTGCCTCCAACAACGGTGGCAAGCAGGCGCTGGAAACTG
TTCAGCGTCTGCTCCCGGTGCTGTGCCAGGCTCACGGCCTGACCCCGCAGCAAGTGGTGGCTATC
GCCTCCAACGGTGGTGGTCGCCCGGCTCTGGAAAGCATTGTGGCGCAGCTGAGCCGTCCAGACCC
GGCCCTGGCGGCTCTGACCAATGATCACCTGGTGGCCCTGGCCTGCCTGGGTGGCCGTCCGGCTC
TGGATGCCGTGAAGAAAGGTCTGGGC
Translated amino acid sequence:
(SEQ ID NO: 154)
DIADLRTLGYSQQQQEKIKPKVRSTVAQHHEALVGHGFTHAHIVALSQHPAALGTVAVKYQDMIAAL
PEATHEAIVGVGKQWSGARALEALLTVAGELRGPPLQLDTGQLLKIAKRGGVTAVEAVHAWRNALT
GAPLNLTPEQVVAIASHDGGKQALETVQALLPVLCQAHGLTPQQVVAIASHDGGKQALETVQRLLPV
LCQAHGLTPQQVVAIASNGGGKQALETVQRLLPVLCQAHGLTPEQVVAIASNNGGKQALETVQALLP
VLCQAHGLTPEQVVAIASNGGGKQALETVQALLPVLCQAHGLTPEQVVAIASNIGGKQALETVQALL
PVLCQAHGLTPEQVVAIASNIGGKQALETVQRLLPVLCQAHGLTPEQVVAIASNNGGKQALETVQAL
LPVLCQAHGLTPEQVVAIASNGGGKQALETVQRLLPVLCQAHGLTPEQVVAIASNIGGKQALETVQR
LLPVLCQAHGLTPEQVVAIASNNGGKQALETVQALLPVLCQAHGLTPEQVVAIASNNGGKQALETVQ
ALLPVLCQAHGLTPEQVVAIASNIGGKQALETVQALLPVLCQAHGLTPEQVVAIASNNGGKQALETV
QRLLPVLCQAHGLTPQQVVAIASNIGGKQALETVQRLLPVLCQAHGLTPQQVVAIASNNGGKQALET
VQRLLPVLCQAHGLTPQQVVAIASNGGGRPALESIVAQLSRPDPALAALTNDHLVALACLGGRPALD
AVKKGLG
(L) ND4-DdCBE Left mitoTALE repeat
(SEQ ID NO: 155)
GACATCGCGGATCTGCGTACCCTGGGTTACAGCCAGCAGCAGCAGGAGAAGATCAAGCCAAAGG
TGCGCAGCACCGTGGCCCAGCACCATGAAGCTCTGGTGGGTCACGGCTTCACCCACGCGCACATC
GTGGCTCTGAGCCAGCACCCAGCCGCGCTGGGTACCGTGGCCGTGAAATATCAGGACATGATTGC
TGCCCTGCCAGAGGCTACCCATGAAGCGATTGTGGGTGTGGGCAAGCAGTGGAGCGGTGCTCGTG
CGCTGGAGGCCCTGCTGACCGTGGCCGGTGAACTGCGTGGCCCGCCGCTGCAGCTGGATACCGGC
CAGCTGCTGAAAATCGCGAAACGTGGCGGTGTGACCGCTGTGGAAGCTGTGCATGCCTGGCGTAA
TGCTCTGACCGGTGCCCCGCTGAACCTGACCCCGGAACAGGTGGTGGCAATCGCAAGCAATAATG
GTGGTAAACAGGCTCTGGAAACCGTGCAAGCTCTGCTGCCAGTTCTGTGCCAGGCTCATGGTCTG
ACCCCGCAGCAGGTGGTGGCTATTGCCAGCCATGATGGCGGCAAGCAGGCCCTGGAGACCGTGC
AGCGTCTGCTGCCGGTGCTGTGCCAGGCCCATGGCCTGACCCCGCAGCAAGTTGTGGCTATTGCC
AGCAACGGCGGTGGCAAACAGGCTCTGGAGACCGTGCAGCGCCTGTTACCGGTGCTGTGCCAAG
CCCATGGTCTGACCCCGGAGCAGGTGGTGGCGATCGCTAGCAACATTGGTGGCAAGCAGGCCCTG
GAAACCGTGCAGGCGCTGTTGCCGGTGCTGTGCCAAGCCCATGGGCTGACCCCGGAACAAGTTGT
TGCCATTGCCAGCAACAATGGTGGCAAACAGGCTCTGGAAACTGTGCAGGCCCTGCTTCCGGTGC
TGTGCCAGGCCCATGGATTAACCCCGGAACAAGTTGTGGCTATTGCGAGCAATGGCGGCGGCAA
GCAGGCGCTGGAAACCGTGCAGGCTCTGTTACCGGTGCTGTGCCAGGCGCATGGCCTGACCCCGG
AGCAAGTGGTGGCCATCGCTAGCAACATTGGCGGTAAACAGGCGCTGGAGACCGTTCAGCGTCT
GTTACCGGTGCTGTGCCAGGCACATGGCCTTACCCCGGAACAAGTTGTGGCCATTGCCAGCAACA
TCGGCGGCAAGCAGGCCCTGGAAACGGTGCAGGCGCTGCTCCCGGTGCTGTGCCAGGCCCATGG
GTTAACCCCGGAACAAGTGGTTGCTATTGCTAGCCATGATGGCGGTAAACAGGCCCTGGAGACCG
TTCAGCGCCTGCTACCGGTGCTGTGCCAGGCCCATGGTTTAACCCCGGAACAGGTTGTTGCGATT
GCTAGCCACGATGGCGGCAAGCAGGCTCTGGAGACCGTTCAGGCCCTGCTCCCGGTGCTGTGCCA
GGCCCATGGGCTTACCCCGGAGCAAGTTGTTGCTATTGCCTCCAATATTGGCGGTAAACAGGCGC
TGGAAACCGTTCAGGCTCTGCTTCCGGTGCTGTGCCAGGCTCATGGCCTCACCCCGGAACAAGTT
GTGGCGATTGCGTCCCATGATGGCGGCAAGCAGGCCCTGGAAACTGTGCAGGCGCTGCTACCGGT
GCTGTGCCAGGCCCATGGGCTAACCCCGGAACAGGTGGTTGCGATTGCTAGCAACAACGGCGGT
AAACAGGCTCTGGAGACTGTTCAGCGTCTGCTTCCGGTGCTGTGCCAGGCTCATGGGCTGACCCC
GCAGCAAGTGGTTGCTATTGCCAGCAATGGCGGTGGCAAGCAGGCGCTGGAGACTGTTCAGCGC
CTGCTCCCGGTGCTGTGCCAGGCTCATGGTTTAACCCCGGAGCAGGTTGTGGCGATCGCCAGCAA
TGGTGGCGGTAAACAGGCTCTGGAAACGGTGCAGGCCCTGCTCCCGGTGCTGTGCCAGGCTCATG
GACTGACCCCGGAGCAAGTTGTTGCCATTGCGTCCCACGACGGCGGCAAGCAGGCGCTGGAGAC
GGTGCAGGCTCTGCTCCCGGTGCTGTGCCAGGCTCACGGTCTGACCCCGCAACAGGTGGTGGCAA
TCGCAAGCAACGGTGGTGGTCGTCCGGCACTGGAGAGCATTGTGGCGCAGCTGAGCCGTCCAGA
CCCGGCCCTGGCGGCTCTGACCAATGATCACCTGGTGGCCCTGGCCTGCCTGGGTGGCCGTCCGG
CTCTGGATGCCGTGAAGAAAGGTCTGGGC
Translated amino acid sequence:
(SEQ ID NO: 156)
DIADLRTLGYSQQQQEKIKPKVRSTVAQHHEALVGHGFTHAHIVALSQHPAALGTVAVKYQDMIAAL
PEATHEAIVGVGKQWSGARALEALLTVAGELRGPPLQLDTGQLLKIAKRGGVTAVEAVHAWRNALT
GAPLNLTPEQVVAIASNNGGKQALETVQALLPVLCQAHGLTPQQVVAIASHDGGKQALETVQRLLPV
LCQAHGLTPQQVVAIASNGGGKQALETVQRLLPVLCQAHGLTPEQVVAIASNIGGKQALETVQALLP
VLCQAHGLTPEQVVAIASNNGGKQALETVQALLPVLCQAHGLTPEQVVAIASNGGGKQALETVQALL
PVLCQAHGLTPEQVVAIASNIGGKQALETVQRLLPVLCQAHGLTPEQVVAIASNIGGKQALETVQALL
PVLCQAHGLTPEQVVAIASHDGGKQALETVQRLLPVLCQAHGLTPEQVVAIASHDGGKQALETVQAL
LPVLCQAHGLTPEQVVAIASNIGGKQALETVQALLPVLCQAHGLTPEQVVAIASHDGGKQALETVQA
LLPVLCQAHGLTPEQVVAIASNNGGKQALETVQRLLPVLCQAHGLTPQQVVAIASNGGGKQALETVQ
RLLPVLCQAHGLTPEQVVAIASNGGGKQALETVQALLPVLCQAHGLTPEQVVAIASHDGGKQALETV
QALLPVLCQAHGLTPQQVVAIASNGGGRPALESIVAQLSRPDPALAALTNDHLVALACLGGRPALDA
VKKGLG
(M) ND5.1-DdCBE Right mitoTALE repeat
(SEQ ID NO: 157)
GACATCGCGGATCTGCGTACCCTGGGTTACAGCCAGCAGCAGCAGGAGAAGATCAAGCCAAAGG
TGCGCAGCACCGTGGCCCAGCACCATGAAGCTCTGGTGGGTCACGGCTTCACCCACGCGCACATC
GTGGCTCTGAGCCAGCACCCAGCCGCGCTGGGTACCGTGGCCGTGAAATATCAGGACATGATTGC
TGCCCTGCCAGAGGCTACCCATGAAGCGATTGTGGGTGTGGGCAAGCAGTGGAGCGGTGCTCGTG
CGCTGGAGGCCCTGCTGACCGTGGCCGGTGAACTGCGTGGCCCGCCGCTGCAGCTGGATACCGGC
CAGCTGCTGAAAATCGCGAAACGTGGCGGTGTGACCGCTGTGGAAGCTGTGCATGCCTGGCGTAA
TGCTCTGACCGGTGCCCCGCTGAACCTGACCCCACAGCAGGTGGTGGCAATCGCAAGCCACGACG
GAGGCAAGCAGGCCCTGGAGACCGTGCAGAGGCTGCTGCCCGTGCTGTGCCAGGCACACGGACT
GACACCTGAACAGGTCGTGGCAATCGCATCCAACGGAGGCGGCAAGCAGGCCCTGGAAACCGTG
CAGCGCCTGTTACCCGTGCTGTGCCAGGCCCACGGCCTGACACCCCAGCAGGTGGTGGCCATCGC
CTCTAATGGAGGGGGCAAGCAGGCCCTGGAGACGGTGCAGCGGCTGCTGCCTGTGCTGTGCCAG
GCTCATGGACTGACACCAGAACAGGTGGTCGCAATCGCAAGCAACGGAGGTGGCAAGCAGGCCC
TGGAGACTGTGCAGGCCCTGCTTCCCGTGCTGTGCCAGGCTCACGGACTGACACCTCAGCAGGTC
GTCGCCATCGCCTCCAACAATGGTGGCAAGCAGGCCCTGGAGACAGTGCAGAGACTGCTGCCAG
TGCTGTGCCAAGCCCATGGACTGACACCACAGCAGGTCGTCGCTATCGCCTCTAATAACGGCGGC
AAGCAGGCCCTGGAGACGGTACAGAGGCTGTTACCCGTGCTGTGCCAAGCACACGGACTGACAC
CAGAGCAGGTCGTCGCAATCGCCAGCAATATCGGTGGCAAGCAGGCCCTGGAGACGGTCCAGCG
CCTGCTCCCCGTGCTGTGCCAAGCCCACGGCCTGACCCCTCAGCAGGTCGTGGCTATTGCTAGCA
ATAACGGGGGCAAGCAGGCCCTGGAGACGGTTCAGCGGCTGTTGCCCGTGCTGTGCCAAGCCCA
CGGTCTGACCCCTCAGCAGGTGGTCGCTATTGCTTCTAATGGAGGAGGCAAGCAGGCCCTGGAGA
CGGTACAGAGACTGTTACCTGTGCTGTGCCAGGCACATGGCCTGACACCAGAGCAGGTGGTCGCT
ATCGCCAGCAACATAGGTGGCAAGCAGGCCCTGGAGACGGTACAGAGGCTGCTTCCCGTGCTGT
GCCAAGCTCATGGCCTGACACCTGAACAGGTGGTCGCCATTGCTAGCAATAACGGTGGCAAGCA
GGCCCTGGAGACGGTACAGCGGCTGTTACCAGTGCTGTGCCAAGCACATGGCTTAACCCCTCAAC
AGGTCGTCGCAATTGCCTCTAATATCGGAGGCAAGCAGGCCCTGGAGACGGTACAGCGGCTGCTC
CCCGTGCTGTGCCAGGCGCACGGCCTGACTCCTCAGCAGGTCGTGGCAATCGCCAGCAACATCGG
CGGCAGACCTGCCCTGGAGAGCATTGTGGCGCAGCTGAGCCGTCCAGACCCGGCCCTGGCGGCTC
TGACCAATGATCACCTGGTGGCCCTGGCCTGCCTGGGTGGCCGTCCGGCTCTGGATGCCGTGAAG
AAAGGTCTGGGC
Translated amino acid sequence:
(SEQ ID NO: 11)
DIADLRTLGYSQQQQEKIKPKVRSTVAQHHEALVGHGFTHAHIVALSQHPAALGTVAVKYQDMIAAL
PEATHEAIVGVGKQWSGARALEALLTVAGELRGPPLQLDTGQLLKIAKRGGVTAVEAVHAWRNALT
GAPLNLTPQQVVAIASHDGGKQALETVQRLLPVLCQAHGLTPEQVVAIASNGGGKQALETVQRLLPV
LCQAHGLTPQQVVAIASNGGGKQALETVQRLLPVLCQAHGLTPEQVVAIASNGGGKQALETVQALLP
VLCQAHGLTPQQVVAIASNNGGKQALETVQRLLPVLCQAHGLTPQQVVAIASNNGGKQALETVQRL
LPVLCQAHGLTPEQVVAIASNIGGKQALETVQRLLPVLCQAHGLTPQQVVAIASNNGGKQALETVQR
LLPVLCQAHGLTPQQVVAIASNGGGKQALETVQRLLPVLCQAHGLTPEQVVAIASNIGGKQALETVQ
RLLPVLCQAHGLTPEQVVAIASNNGGKQALETVQRLLPVLCQAHGLTPQQVVAIASNIGGKQALETV
QRLLPVLCQAHGLTPQQVVAIASNIGGRPALESIVAQLSRPDPALAALTNDHLVALACLGGRPALDAV
KKGLG
(N) ND5.1-DdCBE Left mitoTALE repeat
(SEQ ID NO: 158)
CTGACCCCTGAGCAGGTGGTGGCCATCGCCAGCAATATCGGAGGCAAGCAGGCCCTGGAGACCG
TGCAGGCCCTGCTGCCCGTGCTGTGCCAGGCACACGGACTGACACCTCAGCAGGTCGTCGCCATC
GCCTCCAACAATGGCGGCAAGCAGGCCCTGGAAACCGTGCAGAGGCTGTTACCCGTGCTGTGCCA
GGCCCACGGCCTGACACCCCAGCAGGTGGTGGCAATCGCATCTCACGATGGGGGCAAGCAGGCC
CTGGAGACGGTGCAGCGCCTGCTGCCTGTGCTGTGCCAGGCTCATGGACTGACACCAGAACAGGT
CGTGGCCATCGCCAGCAACATTGGCGGCAAGCAGGCCCTGGAGACTGTCCAGGCCCTGTTACCCG
TGCTGTGCCAAGCCCATGGACTGACACCTGAACAGGTCGTGGCAATCGCATCCAATGGAGGTGGC
AAGCAGGCCCTGGAGACAGTGCAGGCCCTGCTGCCAGTGCTGTGCCAGGCTCACGGCCTGACACC
AGAACAGGTGGTCGCAATCGCATCTAATGGAGGAGGCAAGCAGGCCCTGGAGACGGTACAGGCC
CTGTTGCCCGTGCTGTGCCAAGCCCACGGACTGACACCAGAGCAGGTCGTCGCTATTGCTTCCAA
CATTGGAGGCAAGCAGGCCCTGGAGACGGTCCAGCGGCTGCTTCCCGTGCTGTGCCAAGCTCATG
GCCTGACACCAGAGCAGGTGGTCGCTATTGCCTCCAACAATGGAGGCAAGCAGGCCCTGGAGAC
GGTTCAGGCCCTGCTTCCCGTGCTGTGCCAGGCTCATGGTCTGACACCCGAACAGGTGGTCGCTA
TCGCCTCTCACGATGGAGGCAAGCAGGCCCTGGAGACGGTACAGAGGCTGTTACCTGTGCTGTGC
CAGGCCCATGGGCTGACCCCAGAACAGGTGGTCGCCATCGCCAGCAACATCGGCGGCAAGCAGG
CCCTGGAGACGGTACAGGCCCTGCTCCCCGTGCTGTGCCAAGCACATGGCCTGACACCCGAGCAG
GTCGTGGCTATTGCTAGCAACAACGGGGGCAAGCAGGCCCTGGAGACGGTACAGGCCCTGCTAC
CAGTGCTGTGCCAAGCGCACGGGCTGACCCCAGAGCAGGTCGTCGCAATCGCCTCTAACAACGGT
GGCAAGCAGGCCCTGGAGACGGTACAGGCCCTGCTGCCCGTGCTGTGCCAAGCGCATGGGCTGA
CTCCAGAACAGGTGGTGGCTATCGCCAGCAACATTGGAGGCAAGCAGGCCCTGGAGACGGTACA
GCGGCTGCTACCCGTGCTGTGCCAAGCGCACGGTCTGACACCTCAGCAGGTGGTCGCTATCGCTT
CTAACATAGGGGGCAAGCAGGCCCTGGAGACGGTACAGCGGCTGCTGCCCGTGCTGTGCCAAGC
GCACGGACTGACCCCACAGCAGGTCGTCGCTATCGCCTCTAACGGAGGAGGCAGACCCGCCCTG
GAG
Translated amino acid sequence:
(SEQ ID NO: 159)
LTPEQVVAIASNIGGKQALETVQALLPVLCQAHGLTPQQVVAIASNNGGKQALETVQRLLPVLCQAH
GLTPQQVVAIASHDGGKQALETVQRLLPVLCQAHGLTPEQVVAIASNIGGKQALETVQALLPVLCQA
HGLTPEQVVAIASNGGGKQALETVQALLPVLCQAHGLTPEQVVAIASNGGGKQALETVQALLPVLCQ
AHGLTPEQVVAIASNIGGKQALETVQRLLPVLCQAHGLTPEQVVAIASNNGGKQALETVQALLPVLC
QAHGLTPEQVVAIASHDGGKQALETVQRLLPVLCQAHGLTPEQVVAIASNIGGKQALETVQALLPVL
CQAHGLTPEQVVAIASNNGGKQALETVQALLPVLCQAHGLTPEQVVAIASNNGGKQALETVQALLPV
LCQAHGLTPEQVVAIASNIGGKQALETVQRLLPVLCQAHGLTPQQVVAIASNIGGKQALETVQRLLPV
LCQAHGLTPQQVVAIASNGGGRPALE
(O) ND5.2-DdCBE Right mitoTALE repeat
(SEQ ID NO: 160)
GACATCGCGGATCTGCGTACCCTGGGTTACAGCCAGCAGCAGCAGGAGAAGATCAAGCCGAAGG
TGCGCAGCACCGTGGCTCAGCACCACGAAGCCCTGGTGGGCCACGGTTTCACCCACGCTCACATC
GTGGCCCTGAGCCAGCACCCAGCCGCGCTGGGCACCGTGGCCGTGAAATATCAGGACATGATTGC
TGCCCTGCCAGAGGCCACCCATGAAGCTATTGTGGGCGTGGGCAAGCAGTGGAGCGGTGCTCGTG
CGCTGGAGGCGCTGCTGACCGTGGCTGGTGAACTGCGTGGTCCGCCGCTGCAGCTGGATACCGGT
CAGCTGCTGAAAATTGCCAAACGTGGCGGTGTGACCGCGGTGGAAGCCGTGCATGCTTGGCGTAA
TGCTCTGACCGGTGCGCCGCTGAACCTGACCCCGCAGCAGGTGGTGGCTATTGCCAGCAACAACG
GCGGTAAACAGGCTCTGGAGACCGTGCAGCGTCTGCTGCCGGTGCTGTGCCAGGCTCATGGTCTG
ACCCCGGAGCAGGTGGTGGCCATTGCTAGCCATGATGGCGGCAAGCAGGCGCTGGAAACCGTGC
AGCGCCTGTTACCGGTGCTGTGCCAAGCCCATGGTCTGACCCCGCAGCAAGTTGTGGCTATTGCG
AGCAACGGCGGTGGCAAACAGGCCCTGGAAACCGTTCAGCGTCTGTTACCGGTGCTGTGCCAGGC
CCATGGCCTGACCCCGGAACAAGTGGTGGCTATCGCCAGCAACATTGGTGGCAAGCAGGCCCTG
GAAACCGTGCAGGCGCTGTTGCCGGTGCTGTGCCAAGCCCATGGGCTGACCCCGCAGCAAGTGGT
TGCGATCGCTAGCAACAACGGTGGCAAACAGGCTCTGGAAACCGTTCAGCGCCTGCTTCCGGTGC
TGTGCCAAGCGCATGGCTTAACCCCGCAGCAAGTTGTGGCCATTGCGAGCAACAACGGTGGCAA
GCAGGCGCTGGAGACCGTTCAGCGTCTGCTTCCGGTGCTGTGCCAGGCGCATGGCCTGACCCCGG
AGCAAGTGGTGGCTATTGCTAGCCACGATGGTGGCAAACAGGCCCTGGAGACCGTGCAGCGCCT
GCTCCCGGTGCTGTGCCAGGCCCATGGATTAACCCCGCAGCAAGTGGTGGCCATCGCCAGCAATG
GCGGCGGCAAGCAGGCTCTGGAAACTGTGCAGCGTCTGTTACCGGTGCTGTGCCAGGCCCATGGG
TTAACCCCGCAGCAGGTTGTTGCCATTGCCTCCAATAATGGCGGTAAACAGGCGCTGGAGACTGT
GCAGCGCCTGCTACCGGTGCTGTGCCAGGCACATGGTCTGACCCCGGAACAAGTTGTTGCCATTG
CGTCCCATGATGGCGGCAAGCAGGCCCTGGAGACTGTTCAGCGTCTGCTCCCGGTGCTGTGCCAG
GCCCATGGTTTAACCCCGGAACAAGTTGTGGCCATTGCTAGCCACGATGGCGGTAAACAGGCTCT
GGAAACTGTTCAGCGCCTGCTGCCGGTGCTGTGCCAAGCACATGGCTTAACCCCGGAACAGGTTG
TTGCTATTGCCAGCAACATCGGCGGCAAGCAGGCTCTGGAGACCGTTCAGGCCCTGTTGCCGGTG
CTGTGCCAGGCCCATGGGCTTACCCCGGAACAAGTGGTTGCCATCGCCAGCAACATTGGCGGTAA
ACAGGCGCTGGAAACCGTTCAGGCTCTGTTGCCGGTGCTGTGCCAGGCTCATGGCCTTACCCCGC
AGCAAGTTGTGGCGATTGCTAGCAATGGCGGTGGCAAGCAGGCGCTGGAGACGGTTCAGCGTCT
GCTACCGGTGCTGTGCCAGGCTCATGGATTGACCCCGCAGCAGGTCGTGGCCATTGCCTCCAATA
ACGGTGGCAAACAGGCGCTGGAGACAGTTCAGCGCCTGCTGCCGGTGCTGTGCCAGGCTCATGG
GTTGACCCCGCAGCAGGTAGTTGCTATTGCTAGCAATGGTGGCGGTCGTCCGGCCCTGGAGAGCA
TTGTGGCGCAGCTGAGCCGTCCAGACCCGGCGCTGGCGGCTCTGACCAACGATCACCTGGTGGCG
CTGGCTTGCCTGGGCGGTCGTCCGGCCCTGGATGCCGTGAAGAAAGGCCTGGGT
Translated amino acid sequence:
(SEQ ID NO: 161)
DIADLRTLGYSQQQQEKIKPKVRSTVAQHHEALVGHGFTHAHIVALSQHPAALGTVAVKYQDMIAAL
PEATHEAIVGVGKQWSGARALEALLTVAGELRGPPLQLDTGQLLKIAKRGGVTAVEAVHAWRNALT
GAPLNLTPQQVVAIASNNGGKQALETVQRLLPVLCQAHGLTPEQVVAIASHDGGKQALETVQRLLPV
LCQAHGLTPQQVVAIASNGGGKQALETVQRLLPVLCQAHGLTPEQVVAIASNIGGKQALETVQALLP
VLCQAHGLTPQQVVAIASNNGGKQALETVQRLLPVLCQAHGLTPQQVVAIASNNGGKQALETVQRL
LPVLCQAHGLTPEQVVAIASHDGGKQALETVQRLLPVLCQAHGLTPQQVVAIASNGGGKQALETVQR
LLPVLCQAHGLTPQQVVAIASNNGGKQALETVQRLLPVLCQAHGLTPEQVVAIASHDGGKQALETVQ
RLLPVLCQAHGLTPEQVVAIASHDGGKQALETVQRLLPVLCQAHGLTPEQVVAIASNIGGKQALETV
QALLPVLCQAHGLTPEQVVAIASNIGGKQALETVQALLPVLCQAHGLTPQQVVAIASNGGGKQALET
VQRLLPVLCQAHGLTPQQVVAIASNNGGKQALETVQRLLPVLCQAHGLTPQQVVAIASNGGGRPALE
SIVAQLSRPDPALAALTNDHLVALACLGGRPALDAVKKGLG
(P) ND5.2-DdCBE Left mitoTALE repeat
(SEQ ID NO: 162)
GACATCGCGGATCTGCGTACCCTGGGTTACAGCCAGCAGCAGCAGGAGAAGATCAAGCCGAAGG
TGCGCAGCACCGTGGCTCAGCACCACGAAGCCCTGGTGGGCCACGGTTTCACCCACGCTCACATT
GTGGCCCTGAGCCAGCACCCAGCCGCGCTGGGCACCGTGGCCGTGAAATATCAGGATATGATTGC
TGCCCTGCCAGAGGCCACCCATGAAGCTATTGTGGGCGTGGGCAAGCAGTGGAGCGGTGCTCGTG
CGCTGGAGGCGCTGCTGACCGTGGCTGGTGAACTGCGTGGTCCGCCGCTGCAGCTGGACACCGGT
CAGCTGCTGAAAATCGCGAAACGTGGCGGTGTGACCGCGGTGGAAGCCGTGCATGCTTGGCGTA
ATGCTCTGACCGGTGCGCCGCTGAACCTGACCCCTGAGCAGGTGGTGGCAATCGCAAGCCACGAC
GGAGGCAAGCAGGCCCTGGAGACAGTGCAGGCCCTGCTGCCCGTGCTGTGCCAGGCACACGGCC
TGACACCTGAGCAGGTGGTGGCCATCGCCTCCAACATCGGCGGCAAGCAGGCCCTGGAGACAGT
ACAGAGGCTGTTACCCGTGCTGTGCCAGGCCCACGGCCTGACACCCCAGCAGGTCGTCGCCATCG
CCTCTAATATTGGAGGCAAGCAGGCCCTGGAGACAGTCCAGCGCCTGCTGCCTGTGCTGTGCCAG
GCTCATGGCCTGACACCAGAACAGGTCGTGGCCATCGCCAGTAATATTGGGGGCAAGCAGGCCCT
GGAGACAGTTCAGGCCCTGTTACCCGTGCTGTGCCAAGCCCATGGCCTGACACCTGAACAGGTGG
TCGCCATCGCCTCCAATATTGGTGGCAAGCAGGCCCTGGAGACAGTACAGGCCCTGCTGCCAGTG
CTGTGCCAGGCTCACGGCCTGACACCAGAGCAGGTCGTCGCAATCGCATCTCATGATGGCGGCAA
GCAGGCCCTGGAGACAGTACAGGCCCTGTTACCCGTGCTGTGCCAAGCGCACGGCCTGACCCCTG
AACAGGTCGTGGCTATTGCAAGCCACGATGGTGGCAAGCAGGCCCTGGAGACAGTACAGCGGCT
GCTTCCCGTGCTGTGCCAAGCTCATGGCCTGACACCTGAGCAGGTCGTCGCTATTGCTAGCAATAT
TGGCGGCAAGCAGGCCCTGGAGACAGTACAGGCCCTGCTCCCCGTGCTGTGCCAAGCACACGGC
CTGACACCCGAACAGGTGGTGGCTATCGCCTCTAATGGAGGTGGCAAGCAGGCCCTGGAGACAG
TACAGAGGCTGCTTCCTGTGCTGTGCCAGGCCCATGGCCTGACCCCTGAGCAGGTCGTGGCTATT
GCCAGTAATATAGGAGGCAAGCAGGCCCTGGAGACAGTACAGGCCCTGCTACCCGTGCTGTGCC
AAGCGCATGGCCTGACCCCAGAACAGGTCGTGGCAATCGCATCTCATGACGGCGGCAAGCAGGC
CCTGGAGACAGTACAGGCCCTGCTACCAGTGCTGTGCCAAGCACATGGCCTGACCCCCGAACAGG
TGGTGGCAATCGCCTCTCACGACGGGGGCAAGCAGGCCCTGGAGACAGTACAGGCCCTGCTACC
CGTGCTGTGCCAAGCGCACGGCCTGACGCCAGAACAGGTGGTCGCTATCGCAAGCAACGGCGGT
GGCAAGCAGGCCCTGGAGACAGTACAGCGGCTGCTACCCGTGCTGTGCCAAGCGCACGGCCTGA
CTCCTCAGCAGGTCGTCGCTATCGCATCTCATGATGGTGGCAAGCAGGCCCTGGAGACAGTACAG
CGGCTGCTACCCGTGCTGTGCCAAGCGCACGGCCTGACACCACAGCAGGTCGTCGCAATTGCATC
TAACGGAGGAGGCAGACCCGCCCTGGAGAGCATTGTGGCTCAGCTGAGCCGTCCAGACCCGGCC
CTGGCGGCTCTGACCAACGATCACCTGGTGGCGCTGGCTTGCCTGGGCGGTCGTCCGGCCCTGGA
TGCGGTGAAGAAAGGCCTGGGT
Translated amino acid sequence:
(SEQ ID NO: 163)
DIADLRTLGYSQQQQEKIKPKVRSTVAQHHEALVGHGFTHAHIVALSQHPAALGTVAVKYQDMIAAL
PEATHEAIVGVGKQWSGARALEALLTVAGELRGPPLQLDTGQLLKIAKRGGVTAVEAVHAWRNALT
GAPLNLTPEQVVAIASHDGGKQALETVQALLPVLCQAHGLTPEQVVAIASNIGGKQALETVQRLLPVL
CQAHGLTPQQVVAIASNIGGKQALETVQRLLPVLCQAHGLTPEQVVAIASNIGGKQALETVQALLPVL
CQAHGLTPEQVVAIASNIGGKQALETVQALLPVLCQAHGLTPEQVVAIASHDGGKQALETVQALLPV
LCQAHGLTPEQVVAIASHDGGKQALETVQRLLPVLCQAHGLTPEQVVAIASNIGGKQALETVQALLP
VLCQAHGLTPEQVVAIASNGGGKQALETVQRLLPVLCQAHGLTPEQVVAIASNIGGKQALETVQALL
PVLCQAHGLTPEQVVAIASHDGGKQALETVQALLPVLCQAHGLTPEQVVAIASHDGGKQALETVQAL
LPVLCQAHGLTPEQVVAIASNGGGKQALETVQRLLPVLCQAHGLTPQQVVAIASHDGGKQALETVQR
LLPVLCQAHGLTPQQVVAIASNGGGRPALESIVAQLSRPDPALAALTNDHLVALACLGGRPALDAVK
KGLG
(Q) ND5.3-DdCBE Right mitoTALE repeat
(SEQ ID NO: 164)
GACATCGCGGATCTGCGTACCCTGGGTTACAGCCAGCAGCAGCAGGAGAAGATCAAGCCAAAGG
TGCGCAGCACCGTGGCCCAGCACCATGAAGCTCTGGTGGGTCACGGCTTCACCCACGCGCACATC
GTGGCTCTGAGCCAGCACCCAGCCGCGCTGGGTACCGTGGCCGTGAAATATCAGGACATGATTGC
TGCCCTGCCAGAGGCTACCCATGAAGCGATTGTGGGTGTGGGCAAGCAGTGGAGCGGTGCTCGTG
CGCTGGAGGCCCTGCTGACCGTGGCCGGTGAACTGCGTGGCCCGCCGCTGCAGCTGGATACCGGC
CAGCTGCTGAAAATCGCGAAACGTGGCGGTGTGACCGCTGTGGAAGCTGTGCATGCCTGGCGTAA
TGCTCTGACCGGTGCCCCGCTGAACCTGACACCACAGCAGGTCGTCGCTATCGCTTCAAACATTG
GGGGGAAACAGGCACTGGAAACCGTCCAGAGACTGCTGCCCGTCCTGTGCCAGGCCCACGGCCT
GACCCCTGAGCAGGTGGTGGCCATCGCCAGCAATATCGGAGGCAAGCAGGCCCTGGAGACCGTG
CAGCGGCTGCTGCCCGTGCTGTGCCAAGCCCACGGCTTAACACCTCAGCAGGTCGTGGCTATCGC
CTCCAACAATGGCGGCAAGCAGGCCCTGGAGACGGTGCAGAGACTGCTGCCAGTGCTGTGCCAG
GCCCACGGCTTAACACCAGAACAGGTCGTGGCCATCGCCTCTAACATTGGCGGCAAGCAGGCCCT
GGAGACTGTGCAGGCCCTGCTGCCCGTGCTGTGCCAGGCCCACGGCCTTACACCACAGCAGGTGG
TGGCAATCGCCAGCAATGGAGGGGGCAAGCAGGCCCTGGAGACAGTGCAGAGGCTGCTGCCCGT
GCTGTGCCAAGCCCACGGCCTGACACCTCAGCAGGTGGTCGCCATCGCCTCCAACGGAGGTGGCA
AGCAGGCCCTGGAGACGGTACAGCGCCTGCTGCCCGTGCTGTGCCAAGCCCACGGCCTAACACCC
GAACAGGTCGTCGCCATCGCCTCTAACATCGGCGGCAAGCAGGCCCTGGAGACGGTCCAGCGGC
TGCTGCCTGTGCTGTGCCAAGCCCACGGCCTTACCCCTCAGCAGGTCGTGGCAATCGCCAGCAAC
AATGGTGGCAAGCAGGCCCTGGAGACGGTTCAGAGACTGCTGCCCGTGCTGTGCCAAGCCCACG
GCCTCACACCTCAGCAGGTGGTGGCCATTGCCTCCAACGGAGGAGGCAAGCAGGCCCTGGAGAC
GGTACAGAGGCTGCTGCCAGTGCTGTGCCAGGCCCACGGCCTAACACCAGAACAGGTGGTCGCT
ATTGCCTCTAACATTGGTGGCAAGCAGGCCCTGGAGACGGTACAGCGCCTGCTGCCCGTGCTGTG
CCAAGCCCACGGCCTAACGCCAGAACAGGTCGTCGCTATCGCCAGCAACGGAGGAGGCAAGCAG
GCCCTGGAGACGGTACAGCGGCTGCTGCCCGTGCTGTGCCAAGCCCACGGCCTAACCCCACAGCA
GGTCGTGGCCATTGCCTCCAATAACGGCGGCAAGCAGGCCCTGGAGACGGTACAGCGGCTGCTG
CCCGTGCTGTGCCAAGCCCACGGCCTAACTCCCCAGCAAGTCGTCGCTATTGCCTCTAATAACGG
GGGCAAGCAGGCCCTGGAGACGGTACAGAGACTGCTGCCCGTGCTGTGCCAAGCCCACGGCCTG
ACACCACAGCAGGTCGTCGCCATCGCAAGCAACGGAGGAGGGAGGCCCGCACTGGAGAGCATTG
TGGCGCAGCTGAGCCGTCCAGACCCGGCCCTGGCGGCTCTGACCAATGATCACCTGGTGGCCCTG
GCCTGCCTGGGTGGCCGTCCGGCTCTGGATGCCGTGAAGAAAGGTCTGGGC
Translated amino acid sequence:
(SEQ ID NO: 165)
DIADLRTLGYSQQQQEKIKPKVRSTVAQHHEALVGHGFTHAHIVALSQHPAALGTVAVKYQDMIAAL
PEATHEAIVGVGKQWSGARALEALLTVAGELRGPPLQLDTGQLLKIAKRGGVTAVEAVHAWRNALT
GAPLNLTPQQVVAIASNIGGKQALETVQRLLPVLCQAHGLTPEQVVAIASNIGGKQALETVQRLLPVL
CQAHGLTPQQVVAIASNNGGKQALETVQRLLPVLCQAHGLTPEQVVAIASNIGGKQALETVQALLPV
LCQAHGLTPQQVVAIASNGGGKQALETVQRLLPVLCQAHGLTPQQVVAIASNGGGKQALETVQRLLP
VLCQAHGLTPEQVVAIASNIGGKQALETVQRLLPVLCQAHGLTPQQVVAIASNNGGKQALETVQRLL
PVLCQAHGLTPQQVVAIASNGGGKQALETVQRLLPVLCQAHGLTPEQVVAIASNIGGKQALETVQRL
LPVLCQAHGLTPEQVVAIASNGGGKQALETVQRLLPVLCQAHGLTPQQVVAIASNNGGKQALETVQR
LLPVLCQAHGLTPQQVVAIASNNGGKQALETVQRLLPVLCQAHGLTPQQVVAIASNGGGRPALESIV
AQLSRPDPALAALTNDHLVALACLGGRPALDAVKKGLG
(R) ND5.3-DdCBE Left mitoTALE repeat
(SEQ ID NO: 166)
GACATCGCGGATCTGCGTACCCTGGGTTACAGCCAGCAGCAGCAGGAGAAGATCAAGCCGAAGG
TGCGCAGCACCGTGGCTCAGCACCACGAAGCCCTGGTGGGCCACGGTTTCACCCACGCTCACATT
GTGGCCCTGAGCCAGCACCCAGCCGCGCTGGGCACCGTGGCCGTGAAATATCAGGATATGATTGC
TGCCCTGCCAGAGGCCACCCATGAAGCTATTGTGGGCGTGGGCAAGCAGTGGAGCGGTGCTCGTG
CGCTGGAGGCGCTGCTGACCGTGGCTGGTGAACTGCGTGGTCCGCCGCTGCAGCTGGACACCGGT
CAGCTGCTGAAAATCGCGAAACGTGGCGGTGTGACCGCGGTGGAAGCCGTGCATGCTTGGCGTA
ATGCTCTGACCGGTGCGCCGCTGAACCTGACTCCCGAACAGGTGGTCGCTATCGCTTCTCATGAT
GGCGGAAAACAGGCTCTGGAAACCGTCCAGGCTCTGCTGCCCGTGCTGTGCCAGGCCCACGGCCT
GACCCCACAGCAGGTCGTCGCAATCGCCAGCAATATCGGAGGCAAGCAGGCCCTGGAGACCGTG
CAGCGGCTGCTGCCCGTGCTGTGCCAAGCCCACGGCTTAACACCTCAGCAGGTGGTGGCCATCGC
CTCCAACAATGGCGGCAAGCAGGCCCTGGAGACGGTGCAGAGACTGCTGCCAGTGCTGTGCCAG
GCCCACGGCTTAACACCAGAACAGGTCGTGGCAATCGCCTCTAACGGAGGGGGCAAGCAGGCCC
TGGAGACTGTGCAGGCCCTGCTGCCCGTGCTGTGCCAGGCCCACGGCCTTACACCAGAACAGGTG
GTCGCCATTGCCAGCAATGGAGGTGGCAAGCAGGCCCTGGAGACAGTCCAGGCCCTGCTGCCCGT
GCTGTGCCAAGCCCACGGCCTGACACCTGAACAGGTGGTCGCAATCGCCTCCCACGATGGGGGCA
AGCAGGCCCTGGAGACGGTACAGGCCCTGCTGCCCGTGCTGTGCCAAGCCCACGGCCTAACACCC
GAACAGGTGGTGGCCATTGCCTCTAACGGAGGAGGCAAGCAGGCCCTGGAGACGGTCCAGCGGC
TGCTGCCTGTGCTGTGCCAAGCCCACGGCCTTACCCCTGAACAAGTCGTGGCCATCGCCAGCAAT
GGAGGAGGCAAGCAGGCCCTGGAGACGGTTCAGGCCCTGCTGCCCGTGCTGTGCCAAGCCCACG
GCCTCACACCTGAACAAGTIGTGGCCATCGCCTCCCACGATGGTGGCAAGCAGGCCCTGGAGACG
GTACAGAGGCTGCTGCCAGTGCTGTGCCAGGCCCACGGCCTAACACCAGAACAGGTGGTGGCTAT
CGCCTCTAACATTGGCGGCAAGCAGGCCCTGGAGACGGTACAGGCCCTGCTGCCCGTGCTGTGCC
AAGCCCACGGCCTAACGCCAGAACAGGTCGTCGCTATTGCCAGCAACATTGGGGGCAAGCAGGC
CCTGGAGACGGTACAGGCCCTGCTGCCCGTGCTGTGCCAAGCCCACGGCCTAACCCCTGAACAGG
TGGTGGCAATCGCCTCCAACATTGGTGGCAAGCAGGCCCTGGAGACGGTACAGGCCCTGCTGCCC
GTGCTGTGCCAAGCCCACGGCCTAACTCCCGAGCAGGTCGTCGCCATCGCCTCTAATGGCGGCGG
CAAGCAGGCCCTGGAGACGGTACAGAGGCTGCTGCCTGTGCTGTGCCAAGCCCACGGCCTAACG
CCGCAGCAAGTCGTCGCTATTGCCAGCAATATTGGCGGCAAGCAGGCCCTGGAGACGGTACAGC
GCCTGCTGCCCGTGCTGTGCCAAGCCCACGGCCTGACCCCCCAGCAGGTGGTGGCAATCGCTTCA
AACGGAGGAGGGAGACCCGCTCTGGAAAGCATTGTGGCTCAGCTGAGCCGTCCAGACCCGGCCC
TGGCGGCTCTGACCAACGATCACCTGGTGGCGCTGGCTTGCCTGGGCGGTCGTCCGGCCCTGGAT
GCGGTGAAGAAAGGCCTGGGT
Translated amino acid sequence:
(SEQ ID NO: 167)
DIADLRTLGYSQQQQEKIKPKVRSTVAQHHEALVGHGFTHAHIVALSQHPAALGTVAVKYQDMIAAL
PEATHEAIVGVGKQWSGARALEALLTVAGELRGPPLQLDTGQLLKIAKRGGVTAVEAVHAWRNALT
GAPLNLTPEQVVAIASHDGGKQALETVQALLPVLCQAHGLTPQQVVAIASNIGGKQALETVQRLLPVL
CQAHGLTPQQVVAIASNNGGKQALETVQRLLPVLCQAHGLTPEQVVAIASNGGGKQALETVQALLPV
LCQAHGLTPEQVVAIASNGGGKQALETVQALLPVLCQAHGLTPEQVVAIASHDGGKQALETVQALLP
VLCQAHGLTPEQVVAIASNGGGKQALETVQRLLPVLCQAHGLTPEQVVAIASNGGGKQALETVQALL
PVLCQAHGLTPEQVVAIASHDGGKQALETVQRLLPVLCQAHGLTPEQVVAIASNIGGKQALETVQAL
LPVLCQAHGLTPEQVVAIASNIGGKQALETVQALLPVLCQAHGLTPEQVVAIASNIGGKQALETVQAL
LPVLCQAHGLTPEQVVAIASNGGGKQALETVQRLLPVLCQAHGLTPQQVVAIASNIGGKQALETVQR
LLPVLCQAHGLTPQQVVAIASNGGGRPALESIVAQLSRPDPALAALTNDHLVALACLGGRPALDAVK
KGLG
(S) ATP8-DdCBE Right mitoTALE repeat
(SEQ ID NO: 168)
GACATCGCGGATCTGCGTACCCTGGGTTACAGCCAGCAGCAGCAGGAGAAGATCAAGCCAAAGG
TGCGCAGCACCGTGGCCCAGCACCATGAAGCTCTGGTGGGTCACGGCTTCACCCACGCGCACATC
GTGGCTCTGAGCCAGCACCCAGCCGCGCTGGGTACCGTGGCCGTGAAATATCAGGACATGATTGC
TGCCCTGCCAGAGGCTACCCATGAAGCGATTGTGGGTGTGGGCAAGCAGTGGAGCGGTGCTCGTG
CGCTGGAGGCCCTGCTGACCGTGGCCGGTGAACTGCGTGGCCCGCCGCTGCAGCTGGATACCGGC
CAGCTGCTGAAAATCGCGAAACGTGGCGGTGTGACCGCTGTGGAAGCTGTGCATGCCTGGCGTAA
TGCTCTGACCGGTGCCCCGCTGAACCTGACCCCTCAGCAGGTGGTGGCCATCGCCAGCAACATCG
GCGGCAAGCAGGCCCTGGAGACAGTGCAGAGGCTGCTGCCCGTGCTGTGCCAGGCACACGGCCT
GACACCTGAGCAGGTGGTGGCAATCGCATCCAATGGAGGAGGCAAGCAGGCCCTGGAGACAGTA
CAGCGCCTGTTACCCGTGCTGTGCCAGGCCCACGGCCTGACACCCCAGCAGGTCGTCGCCATCGC
CTCTAACAATGGGGGCAAGCAGGCCCTGGAGACAGTCCAGCGGCTGCTGCCTGTGCTGTGCCAGG
CTCATGGCCTGACACCAGAACAGGTCGTGGCTATTGCCAGCAACAATGGTGGCAAGCAGGCCCTG
GAGACAGTTCAGGCCCTGCTTCCCGTGCTGTGCCAGGCTCACGGCCTGACACCACAGCAGGTCGT
GGCCATCGCCTCCAACAATGGCGGCAAGCAGGCCCTGGAGACAGTACAGAGACTGCTGCCAGTG
CTGTGCCAAGCCCATGGCCTGACCCCTCAGCAGGTCGTGGCAATCGCATCTCACGACGGTGGCAA
GCAGGCCCTGGAGACAGTACAGAGGCTGTTACCCGTGCTGTGCCAAGCACACGGCCTGACACCA
GAGCAGGTCGTCGCAATCGCAAGCAACGGCGGCGGCAAGCAGGCCCTGGAGACAGTACAGCGCC
TGCTCCCCGTGCTGTGCCAAGCCCACGGCCTGACACCTCAGCAGGTGGTCGCCATTGCCAGCAAC
GGCGGGGGCAAGCAGGCCCTGGAGACAGTACAGCGGCTGTTGCCCGTGCTGTGCCAAGCCCACG
GCCTGACGCCCCAGCAGGTGGTCGCCATCGCATCTAACGGCGGTGGCAAGCAGGCCCTGGAGAC
AGTACAGCGGCTGCTTCCTGTGCTGTGCCAGGCCCATGGCCTGACCCCCGAACAGGTCGTGGCTA
TCGCTAGCAACAATGGCGGCAAGCAGGCCCTGGAGACAGTACAGAGACTGTTACCCGTGCTGTG
CCAAGCGCATGGCCTGACCCCTGAACAGGTCGTGGCAATTGCCTCCAATAACGGTGGCAAGCAG
GCCCTGGAGACAGTACAGCGGCTGCTACCAGTGCTGTGCCAAGCACATGGCCTGACCCCCCAGCA
GGTCGTGGCTATTGCATCTAATGGAGGAGGCAGACCCGCCCTGGAGAGCATTGTGGCGCAGCTGA
GCCGTCCAGACCCGGCCCTGGCGGCTCTGACCAATGATCACCTGGTGGCCCTGGCCTGCCTGGGT
GGCCGTCCGGCTCTGGATGCCGTGAAGAAAGGTCTGGGC
Translated amino acid sequence:
(SEQ ID NO: 12)
DIADLRTLGYSQQQQEKIKPKVRSTVAQHHEALVGHGFTHAHIVALSQHPAALGTVAVKYQDMIAAL
PEATHEAIVGVGKQWSGARALEALLTVAGELRGPPLQLDTGQLLKIAKRGGVTAVEAVHAWRNALT
GAPLNLTPQQVVAIASNIGGKQALETVQRLLPVLCQAHGLTPEQVVAIASNGGGKQALETVQRLLPVL
CQAHGLTPQQVVAIASNNGGKQALETVQRLLPVLCQAHGLTPEQVVAIASNNGGKQALETVQALLPV
LCQAHGLTPQQVVAIASNNGGKQALETVQRLLPVLCQAHGLTPQQVVAIASHDGGKQALETVQRLLP
VLCQAHGLTPEQVVAIASNGGGKQALETVQRLLPVLCQAHGLTPQQVVAIASNGGGKQALETVQRLL
PVLCQAHGLTPQQVVAIASNGGGKQALETVQRLLPVLCQAHGLTPEQVVAIASNNGGKQALETVQRL
LPVLCQAHGLTPEQVVAIASNNGGKQALETVQRLLPVLCQAHGLTPQQVVAIASNGGGRPALESIVA
QLSRPDPALAALTNDHLVALACLGGRPALDAVKKGLG
(T) ATP8-DdCBE Left mitoTALE repeat
(SEQ ID NO: 169)
GACATCGCGGATCTGCGTACCCTGGGTTACAGCCAGCAGCAGCAGGAGAAGATCAAGCCGAAGG
TGCGCAGCACCGTGGCTCAGCACCACGAAGCCCTGGTGGGCCACGGTTTCACCCACGCTCACATC
GTGGCCCTGAGCCAGCACCCAGCCGCGCTGGGCACCGTGGCCGTGAAATATCAGGACATGATTGC
TGCCCTGCCAGAGGCCACCCATGAAGCTATTGTGGGCGTGGGCAAGCAGTGGAGCGGTGCTCGTG
CGCTGGAGGCGCTGCTGACCGTGGCTGGTGAACTGCGTGGTCCGCCGCTGCAGCTGGATACCGGT
CAGCTGCTGAAAATCGCGAAACGTGGCGGTGTGACCGCGGTGGAAGCCGTGCATGCTTGGCGTA
ATGCTCTGACCGGTGCGCCGCTGAACCTGACCCCGGAGCAGGTGGTGGCTATCGCCAGCAACATT
GGCGGTAAACAGGCCCTGGAAACCGTGCAGGCGCTGCTGCCGGTGCTGTGCCAGGCTCATGGTCT
GACCCCGCAGCAGGTGGTGGCGATCGCTAGCAACGGCGGTGGCAAGCAGGCTCTGGAGACCGTG
CAGCGTCTGTTACCGGTGCTGTGCCAAGCCCATGGCCTGACCCCGCAGCAAGTTGTGGCCATTGC
GAGCAATGGTGGCGGTAAACAGGCGCTGGAAACCGTGCAGCGCCTGTTGCCGGTGCTGTGCCAA
GCCCATGGGCTGACCCCGGAACAAGTTGTTGCTATCGCCAGCAACATCGGCGGCAAGCAGGCTCT
GGAAACCGTGCAGGCCCTGCTTCCGGTGCTGTGCCAAGCGCATGGTCTGACCCCGGAACAAGTGG
TGGCCATCGCTTCCAATATTGGCGGTAAACAGGCGCTGGAGACCGTGCAGGCTCTGCTCCCGGTG
CTGTGCCAAGCACATGGTCTGACCCCGGAGCAAGTTGTGGCTATTGCCTCCAATATCGGCGGCAA
GCAGGCCCTGGAGACCGTTCAGGCGCTGTTACCGGTGCTGTGCCAGGCCCATGGATTAACCCCGG
AGCAAGTGGTGGCTATTGCTAGCCATGATGGCGGTAAACAGGCCCTGGAGACTGTTCAGCGTCTG
CTACCGGTGCTGTGCCAGGCCCATGGTTTAACCCCGGAACAGGTTGTTGCCATCGCTTCCAACATC
GGCGGCAAGCAGGCTCTGGAAACGGTGCAGGCCCTGTTACCGGTGCTGTGCCAGGCCCATGGGTT
AACCCCGGAACAAGTTGTGGCCATTGCCTCCCATGACGGCGGTAAACAGGCTCTGGAGACCGTTC
AGCGCCTGCTACCGGTGCTGTGCCAGGCGCATGGCTTAACCCCGGAACAAGTGGTTGCCATTGCG
TCCAATATCGGCGGCAAGCAGGCGCTGGAGACCGTTCAGGCTCTGCTTCCGGTGCTGTGCCAGGC
ACATGGCCTTACCCCGGAACAAGTGGTCGCGATCGCTTCCAACATTGGCGGTAAACAGGCCCTGG
AAACGGTTCAGGCGCTGCTTCCGGTGCTGTGCCAGGCCCATGGGCTTACCCCGGAACAGGTTGTG
GCTATTGCCAGTAATATCGGCGGCAAGCAGGCTCTGGAAACTGTGCAGGCCCTGCTACCGGTGCT
GTGCCAGGCTCATGGGCTGACCCCGGAGCAAGTGGTTGCCATTGCCTCCCATGATGGCGGTAAAC
AGGCGCTGGAAACGGTGCAGCGTCTGCTTCCGGTGCTGTGCCAGGCTCATGGCTTAACCCCGCAG
CAAGTTGTTGCGATTGCTAGCAATGGCGGTGGCAAGCAGGCCCTGGAAACTGTTCAGCGCCTGTT
ACCGGTGCTGTGCCAGGCCCATGGGCTAACCCCGGAACAGGTGGTTGCTATTGCCAGCAACATTG
GTGGCAAACAGGCGCTGGAAACTGTGCAGGCTCTGCTTCCGGTGCTGTGCCAGGCCCATGGGCTG
ACCCCGCAGCAAGTGGTTGCTATTGCTAGCAATGGTGGCGGTCGTCCGGCCCTGGAGAGCATTGT
GGCGCAGCTGAGCCGTCCAGACCCGGCCCTGGCGGCTCTGACCAACGATCACCTGGTGGCGCTGG
CTTGCCTGGGCGGTCGTCCGGCCCTGGATGCGGTGAAGAAAGGCCTGGGT
Translated amino acid sequence:
(SEQ ID NO: 170)
DIADLRTLGYSQQQQEKIKPKVRSTVAQHHEALVGHGFTHAHIVALSQHPAALGTVAVKYQDMIAAL
PEATHEAIVGVGKQWSGARALEALLTVAGELRGPPLQLDTGQLLKIAKRGGVTAVEAVHAWRNALT
GAPLNLTPEQVVAIASNIGGKQALETVQALLPVLCQAHGLTPQQVVAIASNGGGKQALETVQRLLPVL
CQAHGLTPQQVVAIASNGGGKQALETVQRLLPVLCQAHGLTPEQVVAIASNIGGKQALETVQALLPV
LCQAHGLTPEQVVAIASNIGGKQALETVQALLPVLCQAHGLTPEQVVAIASNIGGKQALETVQALLPV
LCQAHGLTPEQVVAIASHDGGKQALETVQRLLPVLCQAHGLTPEQVVAIASNIGGKQALETVQALLP
VLCQAHGLTPEQVVAIASHDGGKQALETVQRLLPVLCQAHGLTPEQVVAIASNIGGKQALETVQALL
PVLCQAHGLTPEQVVAIASNIGGKQALETVQALLPVLCQAHGLTPEQVVAIASNIGGKQALETVQALL
PVLCQAHGLTPEQVVAIASHDGGKQALETVQRLLPVLCQAHGLTPQQVVAIASNGGGKQALETVQRL
LPVLCQAHGLTPEQVVAIASNIGGKQALETVQALLPVLCQAHGLTPQQVVAIASNGGGRPALESIVAQ
LSRPDPALAALTNDHLVALACLGGRPALDAVKKGLG

### Intact DddAtox-Cas9 Fusions Sequences

[0640] All intact DddAtox-Cas9 have the general architecture of (from N- to C-terminus): bpNLS-DddAtox-linker 1-dSpCas9 or SpCas9(D10A)-10aa-linker-10aa linker-UGI-4aa linker-bpNLS

(A) DddAtox
(SEQ IN NO: 25)
GSYALGPYQISAPQLPAYNGQTVGTFYYVNDAGGLESKVFSSGGPTPYPNYANAGHVEGQSALFMRD
NGISEGLVFHNNPEGTCGFCVNMTETLLPENAKMTVVPPEGAIPVKRGATGETKVFTGNSNSPKSPTK
GGC
(B) dSpCas9
(SEQ ID NO: 127)
DKKYSIGLAIGTNSVGWAVITDEYKVPSKKFKVLGNTDRHSIKKNLIGALLFDSGETAEATRLKRTAR
RRYTRRKNRICYLQEIFSNEMAKVDDSFFHRLEESFLVEEDKKHERHPIFGNIVDEVAYHEKYPTIYHL
RKKLVDSTDKADLRLIYLALAHMIKFRGHFLIEGDLNPDNSDVDKLFIQLVQTYNQLFEENPINASGV
DAKAILSARLSKSRRLENLIAQLPGEKKNGLFGNLIALSLGLTPNFKSNFDLAEDAKLQLSKDTYDDDL
DNLLAQIGDQYADLFLAAKNLSDAILLSDILRVNTEITKAPLSASMIKRYDEHHQDLTLLKALVRQQLP
EKYKEIFFDQSKNGYAGYIDGGASQEEFYKFIKPILEKMDGTEELLVKLNREDLLRKQRTFDNGSIPHQ
IHLGELHAILRRQEDFYPFLKDNREKIEKILTFRIPYYVGPLARGNSRFAWMTRKSEETITPWNFEEVVD
KGASAQSFIERMTNFDKNLPNEKVLPKHSLLYEYFTVYNELTKVKYVTEGMRKPAFLSGEQKKAIVD
LLFKTNRKVTVKQLKEDYFKKIECFDSVEISGVEDRFNASLGTYHDLLKIIKDKDFLDNEENEDILEDIV
LTLTLFEDREMIEERLKTYAHLFDDKVMKQLKRRRYTGWGRLSRKLINGIRDKQSGKTILDFLKSDGF
ANRNFMQLIHDDSLTFKEDIQKAQVSGQGDSLHEHIANLAGSPAIKKGILQTVKVVDELVKVMGRHK
PENIVIEMARENQTTQKGQKNSRERMKRIEEGIKELGSQILKEHPVENTQLQNEKLYLYYLQNGRDMY
VDQELDINRLSDYDVDAIVPQSFLKDDSIDNKVLTRSDKNRGKSDNVPSEEVVKKMKNYWRQLLNA
KLITQRKFDNLTKAERGGLSELDKAGFIKRQLVETRQITKHVAQILDSRMNTKYDENDKLIREVKVITL
KSKLVSDFRKDFQFYKVREINNYHHAHDAYLNAVVGTALIKKYPKLESEFVYGDYKVYDVRKMIAK
SEQEIGKATAKYFFYSNIMNFFKTEITLANGEIRKRPLIETNGETGEIVWDKGRDFATVRKVLSMPQVN
IVKKTEVQTGGFSKESILPKRNSDKLIARKKDWDPKKYGGFDSPTVAYSVLVVAKVEKGKSKKLKSV
KELLGITIMERSSFEKNPIDFLEAKGYKEVKKDLIIKLPKYSLFELENGRKRMLASAGELQKGNELALPS
KYVNFLYLASHYEKLKGSPEDNEQKQLFVEQHKHYLDEIIEQISEFSKRVILADANLDKVLSAYNKHR
DKPIREQAENIIHLFTLTNLGAPAAFKYFDTTIDRKRYTSTKEVLDATLIHQSITGLYETRIDLSQLGGD
(C) SpCas9 (D10A)
(SEQ ID NO: 128)
DKKYSIGLAIGTNSVGWAVITDEYKVPSKKFKVLGNTDRHSIKKNLIGALLFDSGETAEATRLKRTAR
RRYTRRKNRICYLQEIFSNEMAKVDDSFFHRLEESFLVEEDKKHERHPIFGNIVDEVAYHEKYPTIYHL
RKKLVDSTDKADLRLIYLALAHMIKFRGHFLIEGDLNPDNSDVDKLFIQLVQTYNQLFEENPINASGV
DAKAILSARLSKSRRLENLIAQLPGEKKNGLFGNLIALSLGLTPNFKSNFDLAEDAKLQLSKDTYDDDL
DNLLAQIGDQYADLFLAAKNLSDAILLSDILRVNTEITKAPLSASMIKRYDEHHQDLTLLKALVRQQLP
EKYKEIFFDQSKNGYAGYIDGGASQEEFYKFIKPILEKMDGTEELLVKLNREDLLRKQRTFDNGSIPHQ
IHLGELHAILRRQEDFYPFLKDNREKIEKILTFRIPYYVGPLARGNSRFAWMTRKSEETITPWNFEEVVD
KGASAQSFIERMTNFDKNLPNEKVLPKHSLLYEYFTVYNELTKVKYVTEGMRKPAFLSGEQKKAIVD
LLFKTNRKVTVKQLKEDYFKKIECFDSVEISGVEDRFNASLGTYHDLLKIIKDKDFLDNEENEDILEDIV
LTLTLFEDREMIEERLKTYAHLFDDKVMKQLKRRRYTGWGRLSRKLINGIRDKQSGKTILDFLKSDGF
ANRNFMQLIHDDSLTFKEDIQKAQVSGQGDSLHEHIANLAGSPAIKKGILQTVKVVDELVKVMGRHK
PENIVIEMARENQTTQKGQKNSRERMKRIEEGIKELGSQILKEHPVENTQLQNEKLYLYYLQNGRDMY
VDQELDINRLSDYDVDHIVPQSFLKDDSIDNKVLTRSDKNRGKSDNVPSEEVVKKMKNYWRQLLNA
KLITQRKFDNLTKAERGGLSELDKAGFIKRQLVETRQITKHVAQILDSRMNTKYDENDKLIREVKVITL
KSKLVSDFRKDFQFYKVREINNYHHAHDAYLNAVVGTALIKKYPKLESEFVYGDYKVYDVRKMIAK
SEQEIGKATAKYFFYSNIMNFFKTEITLANGEIRKRPLIETNGETGEIVWDKGRDFATVRKVLSMPQVN
IVKKTEVQTGGFSKESILPKRNSDKLIARKKDWDPKKYGGFDSPTVAYSVLVVAKVEKGKSKKLKSV
KELLGITIMERSSFEKNPIDFLEAKGYKEVKKDLIIKLPKYSLFELENGRKRMLASAGELQKGNELALPS
KYVNFLYLASHYEKLKGSPEDNEQKQLFVEQHKHYLDEIIEQISEFSKRVILADANLDKVLSAYNKHR
DKPIREQAENIIHLFTLTNLGAPAAFKYFDTTIDRKRYTSTKEVLDATLIHQSITGLYETRIDLSQLGGD
(D) UGI
(SEQ ID NO: 378)
TNLSDIIEKETGKQLVIQESILMLPEEVEEVIGNKPESDILVHTAYDESTDENVMLLTSDAPEYKPWALV
IQDSNGENKIKML
(E) bpNLS
(SEQ ID NO: 234)
KRTADGSEFEPKKKRKV
(F) Linker 1: 32 aa linker
(SEQ ID NO: 203)
SGGSSGGSSGSETPGTSESATPESSGGSSGGS
(G) Linker 1: 10 aa flexible
(SEQ ID NO: 218)
GGGGSGGGGS
(H) Linker 1: 10 aa rigid
(SEQ ID NO: 208)
EAAAKEAAAK
(I) Linker 1: 5 aa rigid
(SEQ ID NO: 219)
EAAAK
(J) 10 aa linker
(SEQ ID NO: 220)
SGGSGGSGGS
(K) aa linker
(SEQ ID NO: 221)
SGGS

### Split-DddAtox-Cas9 Fusions Sequences

[0641] All split-DddAtox-Cas9 have the general architecture of (from N- to C-terminus): bpNLS-DddAtox half-32aa linker-dSpCas9 or SaKKH-Cas9(D10A)-10aa linker-UGI-10aa linker-UGI-4aa linker-bpNLS

(A) G1333 DddAtox-N¬
(SEQ ID NO: 338)
GSYALGPYQISAPQLPAYNGQTVGTFYYVNDAGGLESKVFSSGG
(B) G1333 DddAtox-C
(SEQ ID NO: 339)
PTPYPNYANAGHVEGQSALFMRDNGISEGLVFHNNPEGTCGFCVNMTETLLPENAKMTVVPPEGAIP
VKRGATGETKVFTGNSNSPKSPTKGGC
(C) G1397 DddAtox-N¬
(SEQ ID NO: 340)
GSYALGPYQISAPQLPAYNGQTVGTFYYVNDAGGLESKVFSSGGPTPYPNYANAGHVEGQSALFMRD
NGISEGLVFHNNPEGTCGFCVNMTETLLPENAKMTVVPPEG
(D) G1397 DddAtox-C
(SEQ ID NO: 341)
AIPVKRGATGETKVFTGNSNSPKSPTKGGC
(E) dSpCas9
(SEQ ID NO: 127)
DKKYSIGLAIGTNSVGWAVITDEYKVPSKKFKVLGNTDRHSIKKNLIGALLFDSGETAEATRLKRTAR
RRYTRRKNRICYLQEIFSNEMAKVDDSFFHRLEESFLVEEDKKHERHPIFGNIVDEVAYHEKYPTIYHL
RKKLVDSTDKADLRLIYLALAHMIKFRGHFLIEGDLNPDNSDVDKLFIQLVQTYNQLFEENPINASGV
DAKAILSARLSKSRRLENLIAQLPGEKKNGLFGNLIALSLGLTPNFKSNFDLAEDAKLQLSKDTYDDDL
DNLLAQIGDQYADLFLAAKNLSDAILLSDILRVNTEITKAPLSASMIKRYDEHHQDLTLLKALVRQQLP
EKYKEIFFDQSKNGYAGYIDGGASQEEFYKFIKPILEKMDGTEELLVKLNREDLLRKQRTFDNGSIPHQ
IHLGELHAILRRQEDFYPFLKDNREKIEKILTFRIPYYVGPLARGNSRFAWMTRKSEETITPWNFEEVVD
KGASAQSFIERMTNFDKNLPNEKVLPKHSLLYEYFTVYNELTKVKYVTEGMRKPAFLSGEQKKAIVD
LLFKTNRKVTVKQLKEDYFKKIECFDSVEISGVEDRFNASLGTYHDLLKIIKDKDFLDNEENEDILEDIV
LTLTLFEDREMIEERLKTYAHLFDDKVMKQLKRRRYTGWGRLSRKLINGIRDKQSGKTILDFLKSDGF
ANRNFMQLIHDDSLTFKEDIQKAQVSGQGDSLHEHIANLAGSPAIKKGILQTVKVVDELVKVMGRHK
PENIVIEMARENQTTQKGQKNSRERMKRIEEGIKELGSQILKEHPVENTQLQNEKLYLYYLQNGRDMY
VDQELDINRLSDYDVDAIVPQSFLKDDSIDNKVLTRSDKNRGKSDNVPSEEVVKKMKNYWRQLLNA
KLITQRKFDNLTKAERGGLSELDKAGFIKRQLVETRQITKHVAQILDSRMNTKYDENDKLIREVKVITL
KSKLVSDFRKDFQFYKVREINNYHHAHDAYLNAVVGTALIKKYPKLESEFVYGDYKVYDVRKMIAK
SEQEIGKATAKYFFYSNIMNFFKTEITLANGEIRKRPLIETNGETGEIVWDKGRDFATVRKVLSMPQVN
IVKKTEVQTGGFSKESILPKRNSDKLIARKKDWDPKKYGGFDSPTVAYSVLVVAKVEKGKSKKLKSV
KELLGITIMERSSFEKNPIDFLEAKGYKEVKKDLIIKLPKYSLFELENGRKRMLASAGELQKGNELALPS
KYVNFLYLASHYEKLKGSPEDNEQKQLFVEQHKHYLDEIIEQISEFSKRVILADANLDKVLSAYNKHR
DKPIREQAENIIHLFTLTNLGAPAAFKYFDTTIDRKRYTSTKEVLDATLIHQSITGLYETRIDLSQLGGD
(F)
SaKKH-Cas9(D10A)
(SEQ ID NO: 129)
GKRNYILGLAIGITSVGYGIIDYETRDVIDAGVRLFKEANVENNEGRRSKRGARRLKRRRRHRIQRVK
KLLFDYNLLTDHSELSGINPYEARVKGLSQKLSEEEFSAALLHLAKRRGVHNVNEVEEDTGNELSTKE
QISRNSKALEEKYVAELQLERLKKDGEVRGSINRFKTSDYVKEAKQLLKVQKAYHQLDQSFIDTYIDL
LETRRTYYEGPGEGSPFGWKDIKEWYEMLMGHCTYFPEELRSVKYAYNADLYNALNDLNNLVITRD
ENEKLEYYEKFQIIENVFKQKKKPTLKQIAKEILVNEEDIKGYRVTSTGKPEFTNLKVYHDIKDITARKE
IIENAELLDQIAKILTIYQSSEDIQEELTNLNSELTQEEIEQISNLKGYTGTHNLSLKAINLILDELWHTND
NQIAIFNRLKLVPKKVDLSQQKEIPTTLVDDFILSPVVKRSFIQSIKVINAIIKKYGLPNDIIIELAREKNSK
DAQKMINEMQKRNRQTNERIEEIIRTTGKENAKYLIEKIKLHDMQEGKCLYSLEAIPLEDLLNNPFNYE
VDHIIPRSVSFDNSFNNKVLVKQEENSKKGNRTPFQYLSSSDSKISYETFKKHILNLAKGKGRISKTKKE
YLLEERDINRFSVQKDFINRNLVDTRYATRGLMNLLRSYFRVNNLDVKVKSINGGFTSFLRRKWKFK
KERNKGYKHHAEDALIIANADFIFKEWKKLDKAKKVMENQMFEEKQAESMPEIETEQEYKEIFITPHQ
IKHIKDFKDYKYSHRVDKKPNRKLINDTLYSTRKDDKGNTLIVNNLNGLYDKDNDKLKKLINKSPEKL
LMYHHDPQTYQKLKLIMEQYGDEKNPLYKYYEETGNYLTKYSKKDNGPVIKKIKYYGNKLNAHLDI
TDDYPNSRNKVVKLSLKPYRFDVYLDNGVYKFVTVKNLDVIKKENYYEVNSKCYEEAKKLKKISNQ
AEFIASFYKNDLIKINGELYRVIGVNNDLLNRIEVNMIDITYREYLENMNDKRPPHIIKTIASKTQSIKKY
STDILGNLYEVKSKKHPQIIKKGGSPKKKRKVSSDYKDHDGDYKDHDIDYKDDDDK
(G) UGI
(SEQ ID NO: 378)
TNLSDIIEKETGKQLVIQESILMLPEEVEEVIGNKPESDILVHTAYDESTDENVMLLTSDAPEYKPWALV
IQDSNGENKIKML
(H) bpNLS
(SEQ ID NO: 234)
KRTADGSEFEPKKKRKV
(I) 32 aa linker
(SEQ ID NO: 203)
SGGSSGGSSGSETPGTSESATPESSGGSSGGS
(J) 10 aa linker
(SEQ ID NO: 220)
SGGSGGSGGS
(K) 4 aa linker
(SEQ ID NO: 221)
SGGS

General DdCBE Architecture and mitoTALE Amino Acid Sequences

[0642] All right-side halves of DdCBEs have the general architecture of (from N- to C-terminus): COX8A MTS-3×FLAG-mitoTALE-2aa linker-DddAtox half-4aa linker-1×-UGI-ATP5B 3′UTR.

[0643] All left-side halves of DdCBEs have the general architecture of (from N- to C-terminus): SOD2 MTS-3×HA-mitoTALE-2aa linker-DddAtox half-4aa linker-1×-UGI-SOD2 3′UTR

[0644] mitoTALE domains are annotated as: bold for N-terminal domain, underlined for RVD and bolded italics for C-terminal domain.

ND6-DdCBE: Left mitoTALE-G1397-DddAtox-N-1x-UGI (Note: Terminal
NG RVD recognizes a mismatched T instead of a G in the reference
genome)
(SEQ ID NO: 5)
MALSRAVCGTSRQLAPVLGYLGSRQKHSLPDYPYDVPDYAGYPYDVPDYAGYPYDVPDYAMDIADL
RTLGYSQQQQEKIKPKVRSTVAQHHEALVGHGFTHAHIVALSQHPAALGTVAVKYQDMIAALPEATH
EAIVGVGKQWSGARALEALLTVAGELRGPPLQLDTGQLLKIAKRGGVTAVEAVHAWRNALTGAPLN
LTPQQVVAIASNNGGKQALETVQRLLPVLCQAHGLTPEQVVAIASNIGGKQALETVQALLPVLCQAH
GLTPEQVVAIASHDGGKQALETVQRLLPVLCQAHGLTPEQVVAIASHDGGKQALETVQRLLPVLCQA
HGLTPEQVVAIASHDGGKQALETVQRLLPVLCQAHGLTPEQVVAIASHDGGKQALETVQRLLPVLCQ
AHGLTPEQVVAIASHDGGKQALETVQRLLPVLCQAHGLTPEQVVAIASNIGGKQALETVQALLPVLC
QAHGLTPQQVVAIASNGGGKQALETVQRLLPVLCQAHGLTPQQVVAIASNGGGRPALESIVAQLSRP
DPALAALTNDHLVALACLGGRPALDAVKKGLGGSGSYALGPYQISAPQLPAYNGQTVGTFYYVNDA
GGLESKVFSSGGPTPYPNYANAGHVEGQSALFMRDNGISEGLVFHNNPEGTCGFCVNMTETLLPENA
KMTVVPPEGSGGSTNLSDIIEKETGKQLVIQESILMLPEEVEEVIGNKPESDILVHTAYDESTDENVMLL
TSDAPEYKPWALVIQDSNGENKIKML**
ND6-DdCBE: Right mitoTALE-G1397-DddAtox-N-1x-UGI (Note: Terminal
NG RVD recognizes a mismatched T instead of a G in the reference
genome. The NTD was also engineered to be permissive for A, T,
C and G nucleotides at the N0 position)
(SEQ ID NO: 10)
MASVLTPLLLRGLTGSARRLPVPRAKIHSLDYKDHDGDYKDHDIDYKDDDDKMDIADLRTLGYSQQ
QQEKIKPKVRSTVAQHHEALVGHGFTHAHIVALSQHPAALGTVAVKYQDMIAALPEATHEAIVGVGK
RGAGARALEALLTVAGELRGPPLQLDTGQLLKIAKRGGVTAVEAVHAWRNALTGAPLNLTPQQVVA
IASNNGGKQALETVQRLLPVLCQAHGLTPEQVVAIASNIGGKQALETVQALLPVLCQAHGLTPQQVV
AIASNGGGKQALETVQRLLPVLCQAHGLTPQQVVAIASNNGGKQALETVQRLLPVLCQAHGLTPQQV
VAIASNNGGKQALETVQRLLPVLCQAHGLTPEQVVAIASHDGGKQALETVQRLLPVLCQAHGLTPQQ
VVAIASNGGGKQALETVQRLLPVLCQAHGLTPEQVVAIASNIGGKQALETVQALLPVLCQAHGLTPQ
QVVAIASNGGGKQALETVQRLLPVLCQAHGLTPQQVVAIASNGGGKQALETVQRLLPVLCQAHGLTP
QQVVAIASNGGGRPALESIVAQLSRPDPALAALTNDHLVALACLGGRPALDAVKKGLGGSAIPVKRG
ATGETKVFTGNSNSPKSPTKGGCSGGSTNLSDIIEKETGKQLVIQESILMLPEEVEEVIGNKPESDILVHT
AYDESTDENVMLLTSDAPEYKPWALVIQDSNGENKIKML**
ND1-DdCBE Right mitoTALE repeat
(SEQ ID NO: 147)
DIADLRTLGYSQQQQEKIKPKVRSTVAQHHEALVGHGFTHAHIVALSQHPAALGTVAVKYQDMIAAL
PEATHEAIVGVGKQWSGARALEALLTVAGELRGPPLQLDTGQLLKIAKRGGVTAVEAVHAWRNALT
GAPLNLTPEQVVAIASNNGGKQALETVQALLPVLCQAHGLTPQQVVAIASNIGGKQALETVQRLLPVL
CQAHGLTPQQVVAIASNNGGKQALETVQRLLPVLCQAHGLTPEQVVAIASNGGGKQALETVQALLPV
LCQAHGLTPEQVVAIASNGGGKQALETVQALLPVLCQAHGLTPEQVVAIASNGGGKQALETVQALLP
VLCQAHGLTPEQVVAIASNNGGKQALETVQRLLPVLCQAHGLTPEQVVAIASNIGGKQALETVQALL
PVLCQAHGLTPEQVVAIASNGGGKQALETVQRLLPVLCQAHGLTPEQVVAIASNNGGKQALETVQAL
LPVLCQAHGLTPEQVVAIASHDGGKQALETVQALLPVLCQAHGLTPEQVVAIASNGGGKQALETVQA
LLPVLCQAHGLTPEQVVAIASHDGGKQALETVQRLLPVLCQAHGLTPQQVVAIASNIGGKQALETVQ
RLLPVLCQAHGLTPEQVVAIASHDGGKQALETVQALLPVLCQAHGLTPQQVVAIASHDGGKQALETV
QRLLPVLCQAHGLTPQQVVAIASHDGGKQALETVQRLLPVLCQAHGLTPQQVVAIASNGGGRPALESI
VAQLSRPDPALAALTNDHLVALACLGGRPALDAVKKGLG
ND1-DdCBE Left mitoTALE repeat
(SEQ ID NO: 149)
DIADLRTLGYSQQQQEKIKPKVRSTVAQHHEALVGHGFTHAHIVALSQHPAALGTVAVKYQDMIAAL
PEATHEAIVGVGKQWSGARALEALLTVAGELRGPPLQLDTGQLLKIAKRGGVTAVEAVHAWRNALT
GAPLNLTPEQVVAIASHDGGKQALETVQALLPVLCQAHGLTPQQVVAIASNGGGKQALETVQRLLPV
LCQAHGLTPQQVVAIASNIGGKQALETVQRLLPVLCQAHGLTPEQVVAIASNNGGKQALETVQALLP
VLCQAHGLTPEQVVAIASHDGGKQALETVQALLPVLCQAHGLTPEQVVAIASHDGGKQALETVQALL
PVLCQAHGLTPEQVVAIASNGGGKQALETVQRLLPVLCQAHGLTPEQVVAIASNIGGKQALETVQAL
LPVLCQAHGLTPEQVVAIASNNGGKQALETVQRLLPVLCQAHGLTPEQVVAIASHDGGKQALETVQA
LLPVLCQAHGLTPEQVVAIASHDGGKQALETVQALLPVLCQAHGLTPEQVVAIASNNGGKQALETVQ
ALLPVLCQAHGLTPEQVVAIASNGGGKQALETVQRLLPVLCQAHGLTPQQVVAIASNGGGKQALETV
QRLLPVLCQAHGLTPQQVVAIASNGGGRPALESIVAQLSRPDPALAALTNDHLVALACLGGRPALDA
VKKGLG
ND2-DdCBE Right mitoTALE repeat
(SEQ ID NO: 151)
DIADLRTLGYSQQQQEKIKPKVRSTVAQHHEALVGHGFTHAHIVALSQHPAALGTVAVKYQDMIAAL
PEATHEAIVGVGKQWSGARALEALLTVAGELRGPPLQLDTGQLLKIAKRGGVTAVEAVHAWRNALT
GAPLNLTPEQVVAIASNIGGKQALETVQALLPVLCQAHGLTPQQVVAIASNNGGKQALETVQRLLPVL
CQAHGLTPQQVVAIASNIGGKQALETVQRLLPVLCQAHGLTPEQVVAIASNIGGKQALETVQALLPVL
CQAHGLTPEQVVAIASHDGGKQALETVQALLPVLCQAHGLTPEQVVAIASNGGGKQALETVQALLPV
LCQAHGLTPEQVVAIASNNGGKQALETVQRLLPVLCQAHGLTPEQVVAIASHDGGKQALETVQALLP
VLCQAHGLTPEQVVAIASNGGGKQALETVQRLLPVLCQAHGLTPEQVVAIASNIGGKQALETVQALL
PVLCQAHGLTPEQVVAIASNGGGKQALETVQALLPVLCQAHGLTPEQVVAIASNGGGKQALETVQAL
LPVLCQAHGLTPEQVVAIASNIGGKQALETVQRLLPVLCQAHGLTPQQVVAIASNGGGKQALETVQR
LLPVLCQAHGLTPQQVVAIASNGGGRPALESIVAQLSRPDPALAALTNDHLVALACLGGRPALDAVK
KGLG
ND2-DdCBE Left mitoTALE repeat
(SEQ ID NO: 171)
DIADLRTLGYSQQQQEKIKPKVRSTVAQHHEALVGHGFTHAHIVALSQHPAALGTVAVKYQDMIAAL
PEATHEAIVGVGKQWSGARALEALLTVAGELRGPPLQLDTGQLLKIAKRGGVTAVEAVHAWRNALT
GAPLNLTPEQVVAIASHDGGKQALETVQALLPVLCQAHGLTPQQVVAIASNGGGKQALETVQRLLPV
LCQAHGLTPQQVVAIASNGGGKQALETVQRLLPVLCQAHGLTPEQVVAIASNIGGKQALETVQALLP
VLCQAHGLTPEQVVAIASNNGGKQALETVQALLPVLCQAHGLTPEQVVAIASHDGGKQALETVQALL
PVLCQAHGLTPEQVVAIASNIGGKQALETVQRLLPVLCQAHGLTPEQVVAIASNGGGKQALETVQAL
LPVLCQAHGLTPEQVVAIASNIGGKQALETVQRLLPVLCQAHGLTPEQVVAIASHDGGKQALETVQA
LLPVLCQAHGLTPEQVVAIASNGGGKQALETVQALLPVLCQAHGLTPEQVVAIASHDGGKQALETVQ
ALLPVLCQAHGLTPEQVVAIASHDGGKQALETVQRLLPVLCQAHGLTPQQVVAIASNGGGKQALETV
QRLLPVLCQAHGLTPEQVVAIASHDGGKQALETVQALLPVLCQAHGLTPEQVVAIASNIGGKQALET
VQALLPVLCQAHGLTPEQVVAIASNIGGKQALETVQALLPVLCQAHGLTPQQVVAIASNGGGRPALES
IVAQLSRPDPALAALTNDHLVALACLGGRPALDAVKKGLG
ND4-DdCBE Right mitoTALE repeat
(SEQ ID NO: 154)
DIADLRTLGYSQQQQEKIKPKVRSTVAQHHEALVGHGFTHAHIVALSQHPAALGTVAVKYQDMIAAL
PEATHEAIVGVGKQWSGARALEALLTVAGELRGPPLQLDTGQLLKIAKRGGVTAVEAVHAWRNALT
GAPLNLTPEQVVAIASHDGGKQALETVQALLPVLCQAHGLTPQQVVAIASHDGGKQALETVQRLLPV
LCQAHGLTPQQVVAIASNGGGKQALETVQRLLPVLCQAHGLTPEQVVAIASNNGGKQALETVQALLP
VLCQAHGLTPEQVVAIASNGGGKQALETVQALLPVLCQAHGLTPEQVVAIASNIGGKQALETVQALL
PVLCQAHGLTPEQVVAIASNIGGKQALETVQRLLPVLCQAHGLTPEQVVAIASNNGGKQALETVQAL
LPVLCQAHGLTPEQVVAIASNGGGKQALETVQRLLPVLCQAHGLTPEQVVAIASNIGGKQALETVQR
LLPVLCQAHGLTPEQVVAIASNNGGKQALETVQALLPVLCQAHGLTPEQVVAIASNNGGKQALETVQ
ALLPVLCQAHGLTPEQVVAIASNIGGKQALETVQALLPVLCQAHGLTPEQVVAIASNNGGKQALETV
QRLLPVLCQAHGLTPQQVVAIASNIGGKQALETVQRLLPVLCQAHGLTPQQVVAIASNNGGKQALET
VQRLLPVLCQAHGLTPQQVVAIASNGGGRPALESIVAQLSRPDPALAALTNDHLVALACLGGRPALD
AVKKGLG
ND4-DdCBE Left mitoTALE repeat
(SEQ ID NO: 156)
DIADLRTLGYSQQQQEKIKPKVRSTVAQHHEALVGHGFTHAHIVALSQHPAALGTVAVKYQDMIAAL
PEATHEAIVGVGKQWSGARALEALLTVAGELRGPPLQLDTGQLLKIAKRGGVTAVEAVHAWRNALT
GAPLNLTPEQVVAIASNNGGKQALETVQALLPVLCQAHGLTPQQVVAIASHDGGKQALETVQRLLPV
LCQAHGLTPQQVVAIASNGGGKQALETVQRLLPVLCQAHGLTPEQVVAIASNIGGKQALETVQALLP
VLCQAHGLTPEQVVAIASNNGGKQALETVQALLPVLCQAHGLTPEQVVAIASNGGGKQALETVQALL
PVLCQAHGLTPEQVVAIASNIGGKQALETVQRLLPVLCQAHGLTPEQVVAIASNIGGKQALETVQALL
PVLCQAHGLTPEQVVAIASHDGGKQALETVQRLLPVLCQAHGLTPEQVVAIASHDGGKQALETVQAL
LPVLCQAHGLTPEQVVAIASNIGGKQALETVQALLPVLCQAHGLTPEQVVAIASHDGGKQALETVQA
LLPVLCQAHGLTPEQVVAIASNNGGKQALETVQRLLPVLCQAHGLTPQQVVAIASNGGGKQALETVQ
RLLPVLCQAHGLTPEQVVAIASNGGGKQALETVQALLPVLCQAHGLTPEQVVAIASHDGGKQALETV
QALLPVLCQAHGLTPQQVVAIASNGGGRPALESIVAQLSRPDPALAALTNDHLVALACLGGRPALDA
VKKGLG
ND5.1-DdCBE Right mitoTALE repeat
(SEQ ID NO: 11)
DIADLRTLGYSQQQQEKIKPKVRSTVAQHHEALVGHGFTHAHIVALSQHPAALGTVAVKYQDMIAAL
PEATHEAIVGVGKQWSGARALEALLTVAGELRGPPLQLDTGQLLKIAKRGGVTAVEAVHAWRNALT
GAPLNLTPQQVVAIASHDGGKQALETVQRLLPVLCQAHGLTPEQVVAIASNGGGKQALETVQRLLPV
LCQAHGLTPQQVVAIASNGGGKQALETVQRLLPVLCQAHGLTPEQVVAIASNGGGKQALETVQALLP
VLCQAHGLTPQQVVAIASNNGGKQALETVQRLLPVLCQAHGLTPQQVVAIASNNGGKQALETVQRL
LPVLCQAHGLTPEQVVAIASNIGGKQALETVQRLLPVLCQAHGLTPQQVVAIASNNGGKQALETVQR
LLPVLCQAHGLTPQQVVAIASNGGGKQALETVQRLLPVLCQAHGLTPEQVVAIASNIGGKQALETVQ
RLLPVLCQAHGLTPEQVVAIASNNGGKQALETVQRLLPVLCQAHGLTPQQVVAIASNIGGKQALETV
QRLLPVLCQAHGLTPQQVVAIASNIGGRPALESIVAQLSRPDPALAALTNDHLVALACLGGRPALDAV
KKGLG
ND5.1-DdCBE Left mitoTALE repeat
(SEQ ID NO: 172)
DIADLRTLGYSQQQQEKIKPKVRSTVAQHHEALVGHGFTHAHIVALSQHPAALGTVAVKYQDMIAAL
PEATHEAIVGVGKQWSGARALEALLTVAGELRGPPLQLDTGQLLKIAKRGGVTAVEAVHAWRNALT
GAPLNLTPEQVVAIASNIGGKQALETVQALLPVLCQAHGLTPQQVVAIASNNGGKQALETVQRLLPVL
CQAHGLTPQQVVAIASHDGGKQALETVQRLLPVLCQAHGLTPEQVVAIASNIGGKQALETVQALLPV
LCQAHGLTPEQVVAIASNGGGKQALETVQALLPVLCQAHGLTPEQVVAIASNGGGKQALETVQALLP
VLCQAHGLTPEQVVAIASNIGGKQALETVQRLLPVLCQAHGLTPEQVVAIASNNGGKQALETVQALL
PVLCQAHGLTPEQVVAIASHDGGKQALETVQRLLPVLCQAHGLTPEQVVAIASNIGGKQALETVQAL
LPVLCQAHGLTPEQVVAIASNNGGKQALETVQALLPVLCQAHGLTPEQVVAIASNNGGKQALETVQA
LLPVLCQAHGLTPEQVVAIASNIGGKQALETVQRLLPVLCQAHGLTPQQVVAIASNIGGKQALETVQR
LLPVLCQAHGLTPQQVVAIASNGGGRPALESIVAQLSRPDPALAALTNDHLVALACLGGRPALDAVK
KGLG
ND5.2-DdCBE Right mitoTALE repeat (Note: Terminal NG RVD recognizes
a mismatched T instead of a G in the reference genome)
(SEQ ID NO: 161)
DIADLRTLGYSQQQQEKIKPKVRSTVAQHHEALVGHGFTHAHIVALSQHPAALGTVAVKYQDMIAAL
PEATHEAIVGVGKQWSGARALEALLTVAGELRGPPLQLDTGQLLKIAKRGGVTAVEAVHAWRNALT
GAPLNLTPQQVVAIASNNGGKQALETVQRLLPVLCQAHGLTPEQVVAIASHDGGKQALETVQRLLPV
LCQAHGLTPQQVVAIASNGGGKQALETVQRLLPVLCQAHGLTPEQVVAIASNIGGKQALETVQALLP
VLCQAHGLTPQQVVAIASNNGGKQALETVQRLLPVLCQAHGLTPQQVVAIASNNGGKQALETVQRL
LPVLCQAHGLTPEQVVAIASHDGGKQALETVQRLLPVLCQAHGLTPQQVVAIASNGGGKQALETVQR
LLPVLCQAHGLTPQQVVAIASNNGGKQALETVQRLLPVLCQAHGLTPEQVVAIASHDGGKQALETVQ
RLLPVLCQAHGLTPEQVVAIASHDGGKQALETVQRLLPVLCQAHGLTPEQVVAIASNIGGKQALETV
QALLPVLCQAHGLTPEQVVAIASNIGGKQALETVQALLPVLCQAHGLTPQQVVAIASNGGGKQALET
VQRLLPVLCQAHGLTPQQVVAIASNNGGKQALETVQRLLPVLCQAHGLTPQQVVAIASNGGGRPALE
SIVAQLSRPDPALAALTNDHLVALACLGGRPALDAVKKGLG
ND5.2-DdCBE Left mitoTALE repeat
(SEQ ID NO: 173)
DIADLRTLGYSQQQQEKIKPKVRSTVAQHHEALVGHGFTHAHIVALSQHPAALGTVAVKYQDMIAAL
PEATHEAIVGVGKQWSGARALEALLTVAGELRGPPLQLDTGQLLKIAKRGGVTAVEAVHAWRNALT
GAPLNLTPEQVVAIASHDGGKQALETVQALLPVLCQAHGLTPQQVVAIASNIGGKQALETVQRLLPVL
CQAHGLTPQQVVAIASNIGGKQALETVQRLLPVLCQAHGLTPEQVVAIASNIGGKQALETVQALLPVL
CQAHGLTPEQVVAIASNIGGKQALETVQALLPVLCQAHGLTPEQVVAIASHDGGKQALETVQALLPV
LCQAHGLTPEQVVAIASHDGGKQALETVQRLLPVLCQAHGLTPEQVVAIASNIGGKQALETVQALLP
VLCQAHGLTPEQVVAIASNGGGKQALETVQRLLPVLCQAHGLTPEQVVAIASNIGGKQALETVQALL
PVLCQAHGLTPEQVVAIASHDGGKQALETVQALLPVLCQAHGLTPEQVVAIASHDGGKQALETVQAL
LPVLCQAHGLTPEQVVAIASNGGGKQALETVQRLLPVLCQAHGLTPQQVVAIASHDGGKQALETVQR
LLPVLCQAHGLTPQQVVAIASNGGGRPALESIVAQLSRPDPALAALTNDHLVALACLGGRPALDAVK
KGLG
ND5.3-DdCBE Right mitoTALE repeat
(SEQ ID NO: 165)
DIADLRTLGYSQQQQEKIKPKVRSTVAQHHEALVGHGFTHAHIVALSQHPAALGTVAVKYQDMIAAL
PEATHEAIVGVGKQWSGARALEALLTVAGELRGPPLQLDTGQLLKIAKRGGVTAVEAVHAWRNALT
GAPLNLTPQQVVAIASNIGGKQALETVQRLLPVLCQAHGLTPEQVVAIASNIGGKQALETVQRLLPVL
CQAHGLTPQQVVAIASNNGGKQALETVQRLLPVLCQAHGLTPEQVVAIASNIGGKQALETVQALLPV
LCQAHGLTPQQVVAIASNGGGKQALETVQRLLPVLCQAHGLTPQQVVAIASNGGGKQALETVQRLLP
VLCQAHGLTPEQVVAIASNIGGKQALETVQRLLPVLCQAHGLTPQQVVAIASNNGGKQALETVQRLL
PVLCQAHGLTPQQVVAIASNGGGKQALETVQRLLPVLCQAHGLTPEQVVAIASNIGGKQALETVQRL
LPVLCQAHGLTPEQVVAIASNGGGKQALETVQRLLPVLCQAHGLTPQQVVAIASNNGGKQALETVQR
LLPVLCQAHGLTPQQVVAIASNNGGKQALETVQRLLPVLCQAHGLTPQQVVAIASNGGGRPALESIV
AQLSRPDPALAALTNDHLVALACLGGRPALDAVKKGLG
ND5.3-DdCBE Left mitoTALE repeat
(SEQ ID NO: 167)
DIADLRTLGYSQQQQEKIKPKVRSTVAQHHEALVGHGFTHAHIVALSQHPAALGTVAVKYQDMIAAL
PEATHEAIVGVGKQWSGARALEALLTVAGELRGPPLQLDTGQLLKIAKRGGVTAVEAVHAWRNALT
GAPLNLTPEQVVAIASHDGGKQALETVQALLPVLCQAHGLTPQQVVAIASNIGGKQALETVQRLLPVL
CQAHGLTPQQVVAIASNNGGKQALETVQRLLPVLCQAHGLTPEQVVAIASNGGGKQALETVQALLPV
LCQAHGLTPEQVVAIASNGGGKQALETVQALLPVLCQAHGLTPEQVVAIASHDGGKQALETVQALLP
VLCQAHGLTPEQVVAIASNGGGKQALETVQRLLPVLCQAHGLTPEQVVAIASNGGGKQALETVQALL
PVLCQAHGLTPEQVVAIASHDGGKQALETVQRLLPVLCQAHGLTPEQVVAIASNIGGKQALETVQAL
LPVLCQAHGLTPEQVVAIASNIGGKQALETVQALLPVLCQAHGLTPEQVVAIASNIGGKQALETVQAL
LPVLCQAHGLTPEQVVAIASNGGGKQALETVQRLLPVLCQAHGLTPQQVVAIASNIGGKQALETVQR
LLPVLCQAHGLTPQQVVAIASNGGGRPALESIVAQLSRPDPALAALTNDHLVALACLGGRPALDAVK
KGLG
ATP8-DdCBE Right mitoTALE repeat (Note: Terminal NG RVD recognizes
a mismatched T instead of a C in the reference genome)
(SEQ ID NO: 12)
DIADLRTLGYSQQQQEKIKPKVRSTVAQHHEALVGHGFTHAHIVALSQHPAALGTVAVKYQDMIAAL
PEATHEAIVGVGKQWSGARALEALLTVAGELRGPPLQLDTGQLLKIAKRGGVTAVEAVHAWRNALT
GAPLNLTPQQVVAIASNIGGKQALETVQRLLPVLCQAHGLTPEQVVAIASNGGGKQALETVQRLLPVL
CQAHGLTPQQVVAIASNNGGKQALETVQRLLPVLCQAHGLTPEQVVAIASNNGGKQALETVQALLPV
LCQAHGLTPQQVVAIASNNGGKQALETVQRLLPVLCQAHGLTPQQVVAIASHDGGKQALETVQRLLP
VLCQAHGLTPEQVVAIASNGGGKQALETVQRLLPVLCQAHGLTPQQVVAIASNGGGKQALETVQRLL
PVLCQAHGLTPQQVVAIASNGGGKQALETVQRLLPVLCQAHGLTPEQVVAIASNNGGKQALETVQRL
LPVLCQAHGLTPEQVVAIASNNGGKQALETVQRLLPVLCQAHGLTPQQVVAIASNGGGRPALESIVA
QLSRPDPALAALTNDHLVALACLGGRPALDAVKKGLG
ATP8-DdCBE Left mitoTALE repeat
(SEQ ID NO: 170)
DIADLRTLGYSQQQQEKIKPKVRSTVAQHHEALVGHGFTHAHIVALSQHPAALGTVAVKYQDMIAAL
PEATHEAIVGVGKQWSGARALEALLTVAGELRGPPLQLDTGQLLKIAKRGGVTAVEAVHAWRNALT
GAPLNLTPEQVVAIASNIGGKQALETVQALLPVLCQAHGLTPQQVVAIASNGGGKQALETVQRLLPVL
CQAHGLTPQQVVAIASNGGGKQALETVQRLLPVLCQAHGLTPEQVVAIASNIGGKQALETVQALLPV
LCQAHGLTPEQVVAIASNIGGKQALETVQALLPVLCQAHGLTPEQVVAIASNIGGKQALETVQALLPV
LCQAHGLTPEQVVAIASHDGGKQALETVQRLLPVLCQAHGLTPEQVVAIASNIGGKQALETVQALLP
VLCQAHGLTPEQVVAIASHDGGKQALETVQRLLPVLCQAHGLTPEQVVAIASNIGGKQALETVQALL
PVLCQAHGLTPEQVVAIASNIGGKQALETVQALLPVLCQAHGLTPEQVVAIASNIGGKQALETVQALL
PVLCQAHGLTPEQVVAIASHDGGKQALETVQRLLPVLCQAHGLTPQQVVAIASNGGGKQALETVQRL
LPVLCQAHGLTPEQVVAIASNIGGKQALETVQALLPVLCQAHGLTPQQVVAIASNGGGRPALESIVAQ
LSRPDPALAALTNDHLVALACLGGRPALDAVKKGLG

### EXAMPLES

### Example 1. Making Evolved DddA Mutants with Improved Editing Activity at TC Context

[0645] Phage-assisted non-continuous and continuous evolution (PANCE and PACE) was applied to evolve split-DddA (Thuronyi, B. W. et al. Nat Biotechnol 37, 1070-1079(2019)) domains (FIG. 2), resulting in variants that contained mutations in the N-terminal and C-terminal halves of split DddA (FIGS. 3A-3D). Exemplary (a) starter sequences and (b) resulting PACE-evolved variant DddA sequences are represented by SEQ ID NOs: 25-31.

[0646] These DddA mutations were cloned into the DdCBE architecture (MTS-right TALE-G1397 split DddA-(N/C)-UGI) and plasmid transfected into human HEK293T cells (FIG. 3A). At sites that were weakly editing by the wildtype DdCBE, editor variant T1380I improved editing efficiencies 1.2-2.3 fold (FIG. 3B), and variants Q1310R/S1330I/T1380I and T1380I/T1413I improved editing efficiencies by 4.8-4.9-fold up to 40%. (FIG. 3C). The indels associated with the highly active variants remained below the 0.1% detection limit (FIG. 3D). Using directed protein evolution, split G1397-DddA variants that show greatly improved editing efficiencies over the wildtype DddA were successfully evolved.

[0647] Additional PACE-evolved DddA halves are provided in FIG. 4, with corresponding sequences provided below. Each of the variants a PACE-evolved variant of DddA of SEQ ID NO: 25 (corresponding to residues 1290-1427 of canonical DddA):

[0648] Exemplary variant DddA fragments derived (e.g., using continuous evolution, such as PACE) from SEQ ID NO: 25 can include, for example SEQ ID NOs: 25, 32-54.

### Example 2. Continuous Evolution of CRISPR-Free Mitochondrial and Nuclear Base Editors with Enhanced Activity and Expanded Targeting Scope

[0649] Each human cell can contain hundreds of mitochondria and several hundred copies of circular mtDNA¹⁻³. The human mitochondrial genome contains tRNAs and rRNAs that enable mitochondrial translation of mtDNA genes encoding protein subunits of the electron transport chain. Due to the essential role of the mitochondria in energy homeostasis and other biological processes, single-nucleotide mutations in the mtDNA could contribute to developmental disorders, neuromuscular disease and cancer progression⁴⁻⁶. Whole genome analyses from large patient cohorts continue to reveal a growing number of mtDNA somatic substitutions that could contribute to human diseases⁷. To elucidate the role of these mutations in pathogenesis, there is an urgent need to develop technologies that enable the precise installation of point mutations within mtDNA. Such tools could also have the potential to correct deleterious mutations present in the mtDNA.

[0650] Traditional nuclease-based strategies to manipulate mtDNA make targeted double-strand breaks (DSBs) within mtDNA copies that contain specific mutations^{8,9}. Since DSBs in mtDNA lead to the destruction of that copy of mtDNA¹⁰⁻¹¹, this approach is useful for eliminating diseased copies of mtDNA¹². Nucleases, however, cannot introduce specific sequence changes in mtDNA. Genome editing agents including base editors^{13,14} and prime editors¹⁵ are capable of directly installing precise changes in a target DNA sequence, but typically rely on a guide RNA sequence to direct CRISPR-Cas proteins for binding to its target DNA. Due to the challenge of importing guide RNAs into the mitochondria, CRISPR-based systems have thus far not been reliably used for mtDNA engineering¹⁶

[0651] To begin to address this challenge, DdCBE was recently developed to enable targeted C⋅G-to-T⋅A conversions within mtDNA¹⁷. DdCBE uses two mitochondrial-localized TALE proteins to specify the double-stranded DNA (dsDNA) region for editing. Each TALE is fused to a non-toxic half of DddA cytidine deaminase and one copy of uracil glycosylase inhibitor protein to suppress uracil base excision repair. Binding of two TALE-split DddA-UGI fusions to adjacent sites promotes reassembly of functional DddA for deamination of target cytosines within the dsDNA spacing region. DdCBEs have since been applied for mitochondrial base editing in mice, zebrafish and plantsis¹⁸⁻²⁰.

[0652] In initial studies, a range of mtDNA editing efficiencies (4.6% to 49%) were observed depending on the position of the target C within the spacing region between the DNA-bound DdCBE halves¹⁷. It was hypothesized that enhancing the activity of split DddA could increase mtDNA editing efficiencies at putative 5′-TC contexts by improving the compatibility of DddA with different TALE designs and deaminase orientations.

[0653] Given the strict sequence preference of DddA, DdCBEs are currently limited predominantly to TC targets. As presented herein, an increase in DdCBE activity was sought at both TC and non-TC targets by applying rapid phage-assisted continuous evolution (PACE) and related non-continuous PANCE methods^{21,22}. Development of a selection circuit for DdCBE activity followed by PANCE and PACE resulted in several families of DddA variants with conserved mutations enriched during evolution. Evolved variants DddA6 and DddA11 mediated ˜4.3-fold average improvement in mtDNA base editing efficiency at TC targets compared to wild-type DddA. Importantly, DddA11 increased average bulk editing levels at AC and CC targets in the mtDNA and nucleus from <10% with canonical DdCBE to ˜15-40%. These variants collectively enable the installation or correction of C⋅G-to-T⋅A point mutations at both TC and non-TC targets, thus substantially expanding the overall utility of DdCBEs.

### Results

[0654] The all-protein cytosine base editor DdCBE uses TALE proteins and a double-stranded DNA-specific cytidine deaminase (DddA) to mediate targeted C⋅G-to-T⋅A editing. To improve editing efficiency and overcome the strict TC sequence-context constraint of DddA, the experiment used phage-assisted non-continuous and continuous evolution to evolve DddA variants with improved activity and expanded targeting scope. Compared to canonical DdCBEs, base editors with evolved DddA6 improved mitochondrial DNA (mtDNA) editing efficiencies at TC by 3.3-fold, on average. DdCBEs containing evolved DddA11 offered a broadened HC (H=A, C, or T) sequence compatibility for both mitochondrial and nuclear base editing, increasing average editing efficiencies at AC and CC targets from <10% for canonical DdCBE to 15-30%, and up to 50% in cell populations sorted to express both halves of DdCBE. We used these evolved DdCBEs to efficiently install disease-associated mtDNA mutations in human cells at non-TC target sites. DddA6 and DddA11 substantially increase the effectiveness and applicability of all-protein base editing.

### Adapting BE-PACE to Evolve TALE-Based DdCBEs

[0655] PACE uses an M13 phage that is modified to contain an evolving gene in place of gene III (gIII)²³. gIII encodes a capsid protein pIII that is essential for producing infectious phage progeny. To establish a selection circuit, gIII is encoded in an accessory plasmid (AP) within the E. coli host cell such that gIII expression is dependent on the evolving activity. Previously, a BE-PACE system to evolve CRISPR cytosine base editors was reported²¹. In this system, the AP encodes gIII under the control of a T7 promoter. A complementary plasmid (CP) encodes T7 RNA polymerase (T7 RNAP) fused to a degron through a 2-amino-acid linker (FIG. 19A). In the absence of C⋅G-to-T⋅A editing of the linker sequence, the degron triggers constitutive proteolysis of T7, preventing gIII expression (FIG. 19B). The target cytosines for DdCBE-mediated editing were defined as C₆ and C₇, where the subscripted numbers refer to their positions in the spacing region, counting the DNA nucleotide immediately after the binding site of the left-side TALE (TALE3) as position 1. Successful C⋅G-to-T⋅A editing of either one or both C₆ and C₇ targets introduces a stop codon within the linker to prevent translation of the degron tag with T7 RNAP. Active T7 RNAP then initiates gIII expression (FIG. 19B). The nucleotide at position 8 may be modified to either A, T, C or G without changing the protein sequence of T7 RNAP or the degron, thus enabling selection against TC and non-TC contexts (FIG. 19B).

[0656] It was previously observed that splitting DddA at G1397 resulted in higher editing efficiencies of target Cs positioned within the transcription template strand compared to splitting DddA at G1333¹⁷. Given that C₆ and C₇ targets were located in the transcription template strand, a DdCBE that consisted of a left-side TALE (TALE3) and a right-side TALE (TALE4) flanking a 15-bp spacing region, with the target C₇ positioned 7-bp from the 3′ end of the transcription template strand was designed (FIG. 19C). Since E. coli lack mitochondria and the selection circuit relies on editing plasmid DNA in the cytoplasm, the mitochondria-targeting signal sequences were removed. One copy of UGI was also fused to the N-terminus of the TALE protein, which was previously shown to result in higher editing of nuclear DNA compared to C-terminal UGI fusions¹⁷ (FIG. 19C). Given that DddA has virtually no activity against non-TC sequences, it was hypothesized that a DdCBE architecture with maximal editing efficiency would provide a favorable starting point for subsequent evolution for activity against non-TC contexts. UGI-TALE3-DddA-G1397-N and UGI-TALE4-DddA-G1397-C, the DdCBE referred to hereafter as T7-DdCBE, were encoded in the selection phage (SP) to co-evolve both halves of DdCBE (FIG. 19A). The phage genome is continuously mutagenized by an arabinose-inducible mutagenesis plasmid (MP6)²⁴ (FIG. 19A).

[0657] To modulate selection stringency, host strains 1 to 4 were generated. Each host strain contained combinations of AP and CP with different ribosome binding site strengths, such that strain 1 resulted in the lowest selection stringency and strain 4 provided the highest stringency. All tested CPs encoded the TCC linker sequence (FIG. 23A). Then, propagation of the SP in these host strains was tested overnight. At the highest stringency, ˜100-fold overnight phage propagation of an SP containing an active T7-DdCBE was observed, consistent with DdCBE's ability to edit 5′-TC targets. Importantly, phage containing an inactivating E1347A mutation within DddA of T7-DdCBE (dead T7-DdCBE phage) did not propagate (FIG. 23B). These results establish the dependence of phage propagation on DdCBE activity, and that BE-PACE can be successfully adapted to select TALE-based DdCBEs.

### Phage-Assisted Evolution of DdCBE Towards Higher Editing Efficiency at 5′-TC

[0658] It was reasoned that beginning evolution with PANCE may be useful to increase activity and phage propagation before moving into PACE²². PANCE is less stringent because fresh host cells are manually infected with SP from a preceding passage, so no phage is lost to continuous dilution.

[0659] To evolve DdCBEs for higher C⋅G-to-T⋅A editing activity at TC targets, PANCE of canonical T7-DdCBE was initiated by infecting SP into high-stringency strain 4 transformed with MP6 (FIG. 23A). After seven passages, phage populations from all four replicates propagated approximately 10,000-fold overnight (FIG. 23C). Isolated clonal phage from two or more independent replicates were enriched for the mutations T1372I, M1379I, and T1380I within the DddA gene (FIG. 36).

[0660] To validate the editing activity associated with these DddA genotypes, we incorporated each of these mutations into our previously published G1397-split DdCBEs that targeted human MT-ATP8, MT-ND4 and MT-ND5 (FIGS. 37A-37B)¹⁷. HEK293T cells were plasmid-transfected with canonical versions of ATP8-DdCBE, ND4-DdCBE and ND5.2-DdCBE and compared their editing efficiencies to those produced from the corresponding DdCBEs containing the DddA mutants. While T1372I and M1379I impaired editing, T1380I increased C⋅G-to-T⋅A conversions by an average of 1.2- to 2.0-fold across the three mtDNA sites (FIG. 23D). It is possible that the benefit of T1372I and M1379I may require additional mutations evolved during PANCE but not tested in mammalian cells. These results indicate that PANCE of canonical T7-DdCBE was able to yield a DddA variant that resulted in modest improvements in TC editing. The DddA (T1380I) mutant is referred to as DddA1 hereinafter (FIG. 20A).

[0661] To further increase selection stringency, PACE was conducted using an SP encoding the DddA1 variant of T7-DdCBE (T7-DdCBE-DddA1). After 140 h of continuous propagation at a flow rate of 1.5 to 3.0 lagoon vol/h, enrichment of mutations that were distinct across the four replicates was observed, with the T1380I mutation maintained across all lagoons (FIG. 38). The most enriched genotype was selected in each of the four replicates (DddA2, DddA3, DddA4 and DddA5) and tested their mtDNA editing efficiencies (FIGS. 20A-20B). DddA2, DddA3, DddA4 and DddA5 improved average editing efficiencies at target TCs within MT-ND5 and MT-ATP8 from 7.6±2.4% with starting DddA to 14±5.8%, 22±6.1%, 21±7.9% and 24±4.4%, respectively (FIGS. 20C-20D).

[0662] The T1413I mutation in DddA4, which is in the C-terminal half of split-DddA, improved base editing activity of DddA4 by an average of 1.6-fold compared to DddA1. Given that T1413I is positioned along the interface between the two split DddA halves (FIG. 20B), it was hypothesized that this mutation could be promoting the reconstitution of split DddA halves. Incorporating T1413I into DddA5 to form DddA6 (Q1310R+S1330I+T1380I+T1413I) resulted in a modest editing improvement to 26±3.7%, representing a 3.4-fold average improvement in TC editing activity compared to wild-type DddA (FIGS. 20C-20D). Close to 90% of the edited alleles produced from DddA6 contained a TCC-to-TTT conversion, suggesting that consecutive cytosines are likely targets for processive base editing (FIGS. 20E-20F). These results establish DddA6 as a dsDNA cytidine deaminase variant with enhanced editing activity at TC sequences.

[0663] DddA6 was evolved from T7-DdCBE containing DddA split at G1397. To check if DddA6 is compatible with the G1333 split, DddA6 was tested at three mtDNA sites using DdCBEs split at G1333 and observed a 1.3- to 3.6-fold improvement in editing efficiencies compared to wild-type DddA (FIGS. 24A-24C). These data indicate that mutations in DddA6 can enhance mtDNA editing efficiencies of the G1333 split variant, but the extent of this improvement is lower than with the G1397 split. It was noted that increases in editing efficiencies with DddA6 compared to wild-type DddA were modest at sites that exhibit efficient editing even with wild-type DddA, such as MT-ND1 and MT-ND4 (FIGS. 24A-24D). For such sites already efficiently edited with canonical DdCBEs, other deaminase-independent factors, such as mtDNA repair, could limit editing efficiency more than deaminase activity.

Evolving DddA Variants with Expanded Sequence Context Compatibility

[0664] Next, the enhanced activity of DddA6 was assessed to determine if it would enable base editing at target cytosines not in the native TC sequence context. To measure the activity of DddA6 and subsequent evolved variants at TC and non-TC targets, a bacterial plasmid assay was designed to measure C⋅G-to-T⋅A conversion of a target C within an NC₇N context, where N=A, T, C or G. A plasmid-encoded NC₇N target library was transformed into bacteria expressing T7-DdCBE that contained a given DddA variant. After overnight incubation, the plasmid library was isolated and subjected to high-throughput sequencing to measure the C⋅G-to-T⋅A conversion at each of the 16 NC₇N targets (FIG. 21A).

[0665] Consistent with earlier human mtDNA editing results, DddA6 improved the average editing efficiencies of bacterial plasmids containing TC₇N substrates by approximately 1.3-fold. DddA6-mediated editing at non-TC sequences, however, remained negligible (<0.20%) (FIG. 21B), suggesting the possibility of further evolving DddA to deaminate non-TC targets.

[0666] The linker sequence was modified in the CP to contain ACC, CCC or GCC. Next, three high-stringency E. coli hosts (strains 5, 6, and 7) were generated by co-transforming cells with APi and one of three possible CP plasmids (CP2-ACC, CP2-CCC or CP2-GCC) (FIG. 19B and FIG. 25A). The host strains were infected with SP encoding T7-DdCBE-DddA1. A large drop in overnight phage titers across strains 5, 6, and 7 suggested that the starting T7-DdCBE-DddA1 activity against non-TC sequences was too low to support PACE, so evolution was initiated with PANCE (FIG. 25B). A round of mutagenic drift was first conducted to diversify the phage genome in the absence of selection pressure²⁵. Next, three parallel PANCE campaigns of T7-DdCBE-DddA1 (PANCE-ACC, PANCE-CCC and PANCE-GCC) were initiated. Each campaign was challenged with a non-TC linker and was conducted in four replicates (FIGS. 25C-25E).

[0667] Phage that propagated >10,000-fold overnight after nine passages of PANCE was isolated. The DddA genotypes surviving PANCE were strongly enriched for N1342S and E1370K mutations across all PANCE campaigns. Positions A1341 and G1344 were hotspots for substitutions to different amino acids depending on the target linker sequence (FIG. 39).

[0668] Given the substantial increase in phage propagation strength after nine PANCE passages (surviving in total ˜10¹⁶⁻¹⁹-fold dilution), selection stringency was increased by challenging three surviving phage populations (PANCE-CCC-B, PANCE-GCC-A and PANCE-GCC-D) to 138 hours of PACE at a flow rate of 1.5 to 3.5 lagoon vol/h. For PACE, the same MP6-transformed strains 6 and 7 were used that had been applied in earlier PANCE campaigns (FIG. 25A). The resulting PACE-evolved DddA variants converged on the additional mutations T1314A, E1396K, and T1413I (FIG. 40). Given that earlier PACE variant DddA4, which contained T1380I and T1413I mutations, showed ˜1.6-fold improved TC editing relative to DddA1, T1413I could be broadly beneficial for enhancing DddA activity at both TC and non-TC contexts.

### Characterizing Sequence Context Preferences of DddA Variants

[0669] From the phage populations that survived PACE against a CCC- or GCC linker target, six to eight clones and isolated five DddA variants (DddA7, DddA8, DddA9, DddA10 and DddA11) were sequenced based on the consensus mutations within DddA (FIG. 21C). Then, their sequence context preferences were profiled using the same bacterial NC₇N plasmid assay used to characterize DddA6 (FIG. 21A).

[0670] All variants, except DddA8, maintained or improved editing efficiencies at TC, averaging 22-50% (FIG. 21B). DddA9 and DddA10 resulted in approximately 2.0-fold higher TC editing than canonical T7-DdCBE but very low CC editing (<3.0%) (FIG. 21B). While the average AC and CC editing levels by canonical T7-DdCBE were negligible (<0.66%), DddA7, DddA8 and DddA11 yielded an average of 3.4-5.1% editing at these contexts within bacterial plasmids (FIG. 21B). These results demonstrate that PACE can be successfully applied to evolve for DddA variants that show expanded targeting activity beyond TC.

[0671] To validate the activity of these DddA variants in human mtDNA, we replaced wild-type DddA in ND5.2-DdCBE and ATP8-DdCBE with DddA7, DddA8, Ddd9, DddA10, or DddA11 (FIGS. 37A-37B). Consistent with bacterial plasmid editing results, DddA9 and DddA10 resulted in similar improvements in TC editing as DddA6, but did not exhibit consistent non-TC editing across multiple mtDNA sites (FIGS. 21D-21E).

[0672] Among variants DddA7, DddA8 and DddA11, DddA11 supported the highest mtDNA editing efficiencies at TC (18-25%), AC (4.3-5.0%), and CC (7.6-16%) (FIGS. 21D-21E). Processive editing of consecutive cytosines in the spacing region could edit a preceding cytosine to a thymine, thus changing the starting ACC target into ATC₁₀ in MT-ND5 and ATC₉ in MT-ATP8 (FIGS. 21D-21E). To clarify if C₁₀ and C₉ are edited as ACC or ATC targets, the percentage of edited alleles that contained an ACT or ATT product were compared. It was noted that majority of the edited alleles retained the preceding 5′-C(48% for ND5.2-DdCBE and 27% for ATP8-DdCBE) (FIGS. 26A-26B). Thus, C₁₀-to-T₁₀ and C₉-to-T₉ conversions mediated by ND5.2-DdCBE and ATP8-DdCBE, respectively, were classified as editing of CC sequences (FIGS. 21D-21E).

[0673] Given that Ddd8 and DddA11 resulted in higher AC and CC editing than DddA7 in human mtDNA, it was hypothesized that DddA8 and DddA11 might be more toxic than DddA7 when expressed in bacteria. This could explain the lower editing activity of these variants relative to DddA7 in the context profiling assay performed in bacteria (FIG. 21B).

[0674] Next, DddA6 and DddA11 were tested in three other human cell lines for mitochondrial base editing using ND5.2-DdCBE. The right and left halves of ND5.2-DdCBE were fused to fluorescent markers eGFP and mCherry, respectively, by a self-cleaving P2A sequence²⁶ to enable fluorescence-activated cell sorting of nucleofected cells that express both halves of the DdCBE. For poorly transfected cells such as HeLa, enriching cells expressing both eGFP and mCherry (eGFP⁺/mCherry⁺) substantially boosted TC and non-TC editing levels from <1% to 4-31% (FIGS. 27A and FIGS. 41A-41C). In K562 cells and U2OS cells, this enrichment strategy improved average editing by 11-fold and 1.5-fold, respectively, to efficiencies ranging from 20-60% (FIGS. 27B-27C). These results indicate that cell lines other than HEK293T support improved mitochondrial base editing by evolved DddA variants.

[0675] Given that DddA11 resulted in the highest mtDNA editing efficiencies at AC, CC, and TC targets, a reversion analysis was conducted on DddA11 to identify the individual contributions of the mutations. Eight different reversion mutants of DddA11 (11a-h) were generated. Compared to DddA11a, DddA11e had detectable AC and CC editing at MT-ATP8 (0.48-0.76%), indicating that acquisition of N1342S alone was sufficient for modest editing activity at non-TC sequences (FIG. 28). The additive effect of N1342S and E1370K in 11 g further increased AC and CC editing efficiencies, up to 3.4-5.4%. S13330I and A1341V exerted their positive epistatic effect only in the presence of N1342S and E1370K (compare 11b to 11) (FIG. 28). These results collectively suggest that the combination of the six mutations S1330I, A1341V, N1342S, E1370K, T1380I and T1413I enable DddA11 to catalyze efficient base editing at broadened AC, CC, and TC contexts that are poorly edited by canonical DdCBE.

[0676] To determine if improved activity of the evolved DddA6 and DddA11 variants might influence the editing window for DdCBE editing, a separate library of 14 target plasmids was generated for editing by canonical and evolved T7-DdCBEs containing the G1397 split, using the bacterial plasmid assay for context profiling. The spacing region in each target plasmid contained repeats of TC sequences ranging from 12-18-bp. These repeats were positioned on the top or bottom DNA strand (FIG. 29A).

[0677] High-throughput sequencing of the target plasmids revealed the highest editing efficiencies following treatment with DddA11 (FIGS. 29B-29H). Within 12 to 15-bp spacing regions, the canonical and evolved DdCBEs preferentially edited cytosines positioned 4-6 nucleotides and 6-8 nucleotides upstream of the 3′ end of the bottom strand and top strand, respectively (FIG. 21F and FIGS. 29B-29E). At 16 to 18-bp spacing regions, canonical and DddA6-containing DdCBEs maintained modest editing of target cytosine positioned 6 nucleotides upstream of the 3′ end of the bottom strand, but failed to efficiently edit cytosines in the top strand (FIG. 21F and FIGS. 29F-29H). In contrast, DddA11 retained activity for top-strand cytosines positioned 7-9 nucleotides upstream of the 3′ end, but efficiencies were substantially lower compared to shorter spacing lengths (FIG. 21F, compare FIGS. 29B-29E to FIGS. 29F-29H). These results indicate that the editing windows of evolved variants split at G1397 were generally similar to that of canonical DdCBE, with DddA11 exhibiting a larger editing window for spacing lengths >15-bp.

### Evolved DdCBE-Mediated Editing of Nuclear DNA

[0678] It was previously demonstrated that nuclear-localized DdCBE containing two copies of UGI fused to the N-terminus can mediate base editing at nuclear TC targets, which may provide useful alternatives to CRISPR CBEs when guide RNA or PAM requirements are limiting¹⁷ (FIGS. 42A-42B). To test if DddA11 also expands the targeting scope of nuclear DNA base editing, HEK293T cells were transfected with DdCBEs that targeted nuclear SIRT6 or JAK2 loci²⁷. When localized to the nucleus in the G1397-split orientation, DddA11 substantially improved AC, CC and GC nuclear base editing from a typical range of 0-14% to 17-35% (FIGS. 21G-21H; see FIGS. 26C-26D for frequencies of edited alleles). These results collectively show that DddA11 substantially enhances non-TC editing efficiencies for all-protein base editing of both mitochondrial and nuclear DNA.

[0679] To assess for potential nuclear off-target editing, the off-target prediction tool PROGNOS²⁸ was used to rank human nuclear DNA sequences that were predicted to be targeted by the TALE repeats in SIRT6- and JAK2-DdCBE. HEK293T cells were treated with the canonical or evolved DdCBEs and performed amplicon sequencing of the top 9-10 predicted off-target sites for each base editor (Table 9). The average frequencies in which C⋅G base pairs within the predicted off-target spacing region were converted to T⋅A base pairs were very similar between the canonical and evolved DdCBEs (FIGS. 30A-30B). These results suggest that DddA6 and DddA11 did not increase nuclear off-target editing within a subset of computationally predicted off-target sites for a given pair of TALE repeats.

### Attempts to Further Increase Activity at GC Sequences

[0680] It was noted that DddA11 was active mostly at GC₇C₆ and not GC₇C₆(FIG. 21B). Given that a single C₆-to-T₆ conversion in a CC context is sufficient to generate a stop codon (FIG. 19B), the selection pressure to evolve acceptance of GC substrates was likely attenuated. To increase selection stringency, the linker was modified to encode either GCA or GCG such that only DddA variants that show activity at GC were able to restore active T7 RNAP (FIG. 31A). To test for overnight phage propagation when challenged with these modified linkers, host strains 9 and 10 were generated. Strain 9 contains a CP encoding the GCA linker and strain 10 contains a CP encoding the GCG linker (FIG. 31B). Consistent with the weak GC activity of DddA11 (FIG. 21B), a drop in overnight phage titers in strains 9 and 10 was observed, suggesting that the activity of T7-DdCBE-DddA11 against GCA and GCG was too low to support PACE (FIG. 31C and Supplementary Discussion, below).

[0681] PANCE of T7-DdCBE-DddA11 was initiated in MP6-transformed host strains 9 and 10. After 12 passages, overnight phage propagation increased to approximately 100- to 1,000-fold (FIG. 31D and Supplementary Discussion, below). The surviving phage isolates from round 9 and round 12 were sequenced to derive four consensus DddA genotypes (FIG. 32A and FIG. 43). When tested as DdCBEs targeting four mtDNA sites, the evolved variants did not show consistently improved editing efficiencies or targeting scope compared with DddA11, although it was noted that variant 7.9.1 showed higher editing efficiencies at TC targets compared to DddA6 and DddA11 (FIGS. 32B-32E and Supplementary Discussion, below). These results suggest that variants of DddA11 that are able to process GC substrates with improved efficiency are very rare.

### Mitochondrial Off-Target Activity of Evolved DddA Variants

[0682] To profile off-target editing activities of DdCBEs containing DddA6 and DddA11, ATAC-seq was performed of whole mitochondrial genomes from HEK293T cells transfected with plasmids encoding canonical or evolved variants of ND5.2-DdCBE or ATP8-DdCBE. A sequencing depth of approximately 3,000-8,000× was obtained per sample.

[0683] Consistent with previous results¹⁷, the average frequencies of mtDNA-wide off-target editing arising from canonical DdCBEs (0.033±0.002%) were comparable to the untreated control or DdCBEs containing dead DddA6 (0.028±0.001%) (FIG. 21I). Off-target frequencies associated with ND5.2-DdCBE were 1.5-fold higher for DddA6 and DddA11 compared to wild-type DddA, and 3.0- to 4.8-fold for ATP8-DdCBE (FIG. 21I). The average frequencies of all unique single-nucleotide variants (SNVs) containing a C⋅G-to-T⋅A conversion in cells treated with ATP8-DdCBE or ND5.2-DdCBE variants was analyzed (FIGS. 33A-33F). While all 28 SNVs in cells treated with canonical ATP8-DdCBE were <1.0% (FIG. 33A), 76 and 159 SNVs with >1% editing were detected for cells treated with DddA6 and DddA11, respectively (FIGS. 33B-33C). As expected, these results suggest that deaminase-dependent off-target editing increases in the presence of DddA variants with higher activity and expanded targeting scope.

[0684] In addition to deaminase-dependent off-target editing, the TALE repeats also contribute to overall off-target activity. For ND5.2-DdCBEs containing DddA6 or DddA11, fewer than 4 SNVs with >1% frequency were observed—far lower than those observed in ATP8-DdCBE containing the same DddA6 or DddA11 (compare FIGS. 33B-33C to FIGS. 33E-33F). It is hypothesized that TALE repeats that bind promiscuously to multiple DNA bases are more likely to result in higher off-target editing when fused to the evolved DddA variants^{29,30}.

[0685] These results collectively indicate that mtDNA off-target editing increases slightly for DdCBEs that use DddA6 and DddA11, as expected given their higher activity and widened targeting scope, but that the frequency of off-target editing per on-target editing event remains similar to that of canonical DdCBE (FIG. 33G).

Installing Previously Inaccessible Pathogenic Mutations in mtDNA

[0686] To demonstrate the utility of evolved DddA variants with broadened sequence context compatibility, three DdCBEs were designed to install disease-associated C⋅G-to-T⋅A mutations at non-TC positions in human mtDNA. ND4.2-DdCBE installs the m.11696G>A mutation in an ACT context. This mutation is associated with Leber's hereditary optic neuropathy (LHON)³¹. ND4.3-DdCBE installs the m.11642G>A mutation in a GCT context and ND5.4-DdCBE installs the m.13297G>A mutation in a CCA context. Both of these mutations were previously implicated in renal oncocytoma³². These three mutations occur in coding mitochondrial genes and result in either a premature stop codon or a change in amino acid sequence (FIG. 22A).

[0687] The editing efficiencies among DdCBEs containing wild-type DddA, DddA6 or DddA11 split at G1397 were compared. While canonical DdCBEs resulted in negligible editing at non-TC sites, DddA11 edited the on-target cytosines at average efficiencies ranging from 7.1% to 29% in bulk HEK293T cell populations (FIGS. 22B-22D). Despite the very low levels of GC editing mediated by DddA11 in the bacteria plasmid assay (FIG. 21B), DddA11 yielded 7.1±0.69% on-target GC₆ editing when tested in ND4.3-DdCBE (FIG. 22B). The majority of the alleles containing the on-target edit, however, also harbored bystander edits that would result in unintended changes to the protein coding sequence (FIG. 34A).

[0688] Unlike ND4.3-DdCBE, ND4.2- and ND5.4-DdCBE resulted in higher bulk editing efficiencies ranging from 17-29% (FIGS. 22C-22D). More than 57% of the edited alleles contained the desired C⋅G-to-T⋅A on-target edit and a silent bystander edit (FIGS. 34B-34C). DddA11 tested in the G1333 orientation resulted in lower on-target editing compared to the G1397 orientation (FIG. 22C). No on-target editing was detected with DddA11 when the target cytosine falls outside the preferred editing window of the G1333 split¹⁷ (FIG. 22D). These results collectively indicate that DddA11 tested in the G1397 split orientation enables much higher levels of base editing at AC, CC and GC targets than wild-type DddA, even though absolute editing levels at GC targets are modest.

[0689] Next, the phenotypic consequences of installing the missense m.11696G>A mutation and the nonsense m.13297G>A mutation were assessed in human mtDNA. eGFP⁺/mCherry⁺ cells were sorted for to enrich those that expressed both halves of DdCBE. This enrichment increased average on-target editing from 17-29% in unsorted cells to 35-43% in sorted cells (FIGS. 22C-22D). Compared to sorted cells containing dead DddA, sorted cells treated with DddA11-containing ND4.2- and ND5.4-DdCBEs exhibited reduced rates of basal and uncoupled respiration (FIG. 22E and FIG. 22G). These results establish that DddA11 can install candidate pathogenic mutations that canonical DdCBEs are unable to access, and that these edits can occur at levels sufficient to result in altered mitochondrial function. These capabilities could broaden disease-modelling efforts using mitochondrial base editing.

### Discussion

[0690] As recently reported, DdCBEs enable installation of precise mutations within mtDNA for the first time, but target cytosines are primarily limited to 5′-TC contexts, and some target sites are edited with low efficiencies (≤5%)¹⁷. To address these challenges, PACE was applied to rapidly evolve DdCBEs towards improved activity and expanded targeting scope. This work resulted in two DddA variants, DddA6 and DddA11, that function in DdCBEs to mediate mitochondrial and nuclear base editing. These variants improve editing activity both at TC sequences and at previously inaccessible non-TC targets, while maintaining comparably high on-target to off-target editing ratios.

[0691] To edit target cytosines in TC contexts, starting with canonical DdCBE is recommended. If editing efficiency is low, DddA6 can be used to increase editing at TC while minimizing bystander editing of any cytosines in the editing window that are not preceded by a T.

[0692] For target cytosines in non-TC contexts, DddA11 enables editing of AC and CC targets much more efficiently than canonical DdCBE. DddA11 typically supports higher C⋅G-to-T⋅A conversion in the G1397 split orientation compared to the G1333 split orientation. It is possible that initiating PACE with an SP encoding a G1333 split may result in mutations distinct from those found in DddA11. In addition, encoding the UGI on the C-terminus of T7-DdCBE during PACE may enrich additional mutations that favor the reassembly of mitochondrial DdCBEs containing this architecture.

[0693] Given that DddA11 is active at TC, AC and CC contexts, bystander editing is more likely with this variant than with canonical DdCBE. To minimize bystander editing, users may design different TALE binding sites that reduces the number of non-target cytosines within the editing window (FIG. 21F and FIGS. 29A-29H).

[0694] Additional protein evolution or engineering could further improve the editing efficiency of DddA variants, especially at GC targets. While the structure of DddA bound to its dsDNA target is currently unavailable, structural alignment of DddA to existing deaminases with altered sequence specificities could offer insights for further DddA engineering efforts (FIGS. 35A-35B and Supplementary Discussion).

### Supplementary Discussion

### Further Evolution of T7-DdCBE-DddA11 for Improved GC Activity

[0695] Previously, a PANCE of canonical T7-DdCBE was performed using a strains 9 and 10 transformed with MP6. These strains expressed the GCA or GCG linker, respectively (FIG. 31A). After fifteen passages, the overnight fold phage propagation increased to 103, representing >1,000-fold improvement. Clonal sequencing of phage isolated at the end of PANCE, however, revealed a stochastic frameshift mutation within the open reading frame encoding either the left- or right-half of T7-DdCBE (data not shown). It was thought that the premature stop codons helped improve phage fitness by reducing the translational burden on the phage, thus increasing phage propagation in a manner that was independent of the deamination activity of DddA. Given that DddA11 already exhibited a broadened targeting scope and non-zero GC activity (FIG. 22B), it was hypothesized that DddA11 could be a promising evolutionary stepping-stone to serve as a starting target for evolving DddA variants towards higher GC activity.

[0696] PANCE of T7-DdCBE containing DddA11 in duplicates was initiated using the same MP6-transformed strains 9 and 10. One replicate in PANCE-GCA and one replicate PANCE-GCG evolved ‘cheaters’ in which gIII was recombined into the phage genome. The PANCE schedules shown in FIG. 31D are for the other replicates that do not contain gIII within the SP genome. Six to eight plaques were isolated from each replicate after round 9 and round 12 for clonal sequencing. The mutation N1378S was strongly enriched in PANCE-GCA and PANCE-GCG. PANCE-GCA also showed strong consensus for the additional mutations A1341I and P1394S (FIG. 43).

[0697] Two strongly enriched genotypes (7.9.1 and 7.12.1) and two moderately enriched genotypes (7.12.2 and 7.12.3) were selected for validation of mtDNA base editing activity in human cells (FIG. 32A). Variant 7.12.1 generally resulted in a 2.2- to 27-fold decline in AC and CC editing compared to DddA11 (FIGS. 32B-32E). Variants 7.9.1 (SEQ ID NO: 55), 7.12.2 (SEQ ID NO: 57), and 7.12.3 (SEQ ID NO: 58) improved TC and non-TC editing by 1.4- to 1.6-fold when tested as ND4.3-DdCBE, but did not enhance GC editing compared to DddA11 (FIG. 32B). ND5.4-DdCBE containing variant 7.9.1 resulted in comparable editing to DddA11 at AC and CC targets (FIG. 32C). When tested at other sites, variants 7.9.1, 7.12.2, and 7.12.3 improved TC editing by an average of 1.2-fold compared to DddA11. These variants, however, generally resulted in lower non-TC compared to DddA11 when tested as ND5.2-DdCBE and ATP8-DdCBE (FIGS. 32D-32E).

### Structure Alignment of DddA to APOBEC3G

[0698] Previously, ssDNA-specific APOBEC3G cytidine deaminase was identified, which has an intrinsic 5′-CC preference¹, as the closest structural relative to DddA. The catalytic domain of human APOBEC3G complexed with its ssDNA 5′-CCA substrate² was aligned with DNA-free DddA. The PACE-derived DddA variants DddA8 and DddA11 expanded the putative TC sequence preference to include AC and CC (FIG. 21B). These variants contained mutations A1341V, N1342S, G1344R and G1344S that are positioned within a loop that aligns most closely to loop 3 of APOBEC3G (FIGS. 35A-35B). Previous studies identified DNA-binding loop 3 to be critical for enhancing the catalytic activity of APOBEC3G at 5′CC³. In this Example, the N1342S nucleotide substitution in DddA11e increased TC editing by 1.3-fold and yielded low but detectable AC and CC editing (FIG. 28). These results suggest that the DddA loop containing N1342 could be engineered to improve the catalytic activity of DddA and support deamination at non-TC contexts.

[0699] In APOBEC3G, residue D317 in loop 7 is critical for selectivity towards C₋₁³ (FIG. 35B). Context-specific PANCE of DddA strongly enriched for E1370K across all tested linkers of ACC, CCC and GCC (FIG. 39). Given that loop 7 of APOBEC3G spatially aligns with the DddA loop containing E1370K, E1370K could also be involved in altering the substrate selectivity of DddA (FIG. 35B).

### Methods

### General Methods and Molecular Cloning.

[0700] Antibiotics (Gold Biotechnology) were used at the following working concentrations: carbenicillin 100 μg/mL, spectinomycin 50 μg/mL, chloramphenicol 25 μg/mL, kanamycin 50 g/mL, tetracycline 10 μg/mL, streptomycin 50 μg/mL. Nuclease-free water (Qiagen) was used for PCR reactions and cloning. For all other experiments, water was purified using a MilliQ purification system (Millipore). PCR was performed using Phusion U Green Multiplex PCR Master Mix (ThermoFisher Scientific), Phusion U Green Hot Start DNA Polymerase (ThermoFisher Scientific) or Phusion Hot Start II DNA polymerase (ThermoFisher Scientific). All plasmids were constructed using USER cloning (New England Biolabs) and cloned into Machi chemically competent E. coli cells (ThermoFisher Scientific). Unless otherwise noted, plasmid or SP DNA was amplified using the Illustra Templiphi 100 Amplification Kit (GE Healthcare Life Sciences) prior to Sanger sequencing. Plasmids for bacterial transformation were purified using Qiagen Miniprep Kit according to manufacturer's instructions. Plasmids for mammalian transfection were purified using Qiagen Midiprep Kit according to manufacturer's instructions, but with 1.5 mL of RNAse A (1,000 μg/mL) added to Resuspension buffer. Codon-optimized sequences for human cell expression were obtained from GenScript. The amino acid sequences of all DdCBEs and DddA variants are provided in Sequences, below. A full list of bacterial plasmids used in this work is given in Table 4.

TABLE 4
List of bacterial plasmids used in this Example

| | | | | | ORF2 | |
|---|---|---|---|---|---|---|
| | | | ORF1 | | | [RBS] |
| Name | Class (res) | Origin | Promoter | [RBS] Genes | Promoter | Genes |
| pJC175e- | AP (carb^{R}) | SC101 | Pₚₛₚ | [SD8] gIII | P_{ProD} | [SD8] |
| DddI | | | | | | DddI-VSV- |
| | | | | | | G |
| MP6 | MP (chlor^{R}) | cloDF13 | P_{BAD} | dnaQ926, dam, seqA, | P_{c} | araC |
| | | | | emrR, ugi, cda1 | | |
| AP1 | AP (carb^{R}) | SC101 | P_{T7} | [SD8] gIII | | |
| AP2 | AP (carb^{R}) | SC101 | P_{T7} | [sd8] gIII | | |
| CP1-TCC | CP (spec^{R}) | ColE1 | P_{Pro1} | [sd2] T7 RNAP-TCC | | |
| | | | | linker-degron | | |
| CP2-TCC | CP (spec^{R}) | ColE1 | P_{Pro1} | [sd4U] T7 RNAP-TCC | | |
| | | | | linker-degron | | |
| CP2-ACC | CP (spec^{R}) | ColE1 | P_{Pro1} | [sd4U] T7 RNAP-ACC | | |
| | | | | linker-degron | | |
| CP2-CCC | CP (spec^{R}) | ColE1 | P_{Pro1} | [sd4U] T7 RNAP-CCC | | |
| | | | | linker-degron | | |
| CP2-GCC | CP (spec^{R}) | ColE1 | P_{Pro1} | [sd4U] T7 RNAP-GCC | | |
| | | | | linker-degron | | |
| CP3-GCA | CP (spec^{R}) | ColE1 | P_{Pro1} | [sd5] T7 RNAP-GCA | | |
| | | | | linker-degron | | |
| CP3-GCG | CP (spec^{R}) | ColE1 | P_{Pro1} | [sd5] T7 RNAP-GCG | | |
| | | | | linker-degron | | |
| pBM10a | NCN target (carb^{R}) | SC101 | N.A. | ACA target | | |
| pBM10b | NCN target (carb^{R}) | SC101 | N.A. | ACT target | | |
| pBM10c | NCN target (carb^{R}) | SC101 | N.A. | ACC target | | |
| pBM10d | NCN target (carb^{R}) | SC101 | N.A. | ACG target | | |
| pBM10e | NCN target (carb^{R}) | SC101 | N.A. | TCA target | | |
| pBM10f | NCN target (carb^{R}) | SC101 | N.A. | TCT target | | |
| pBM10g | NCN target (carb^{R}) | SC101 | N.A. | TCC target | | |
| pBM10h | NCN target (carb^{R}) | SC101 | N.A. | TCG target | | |
| pBM10i | NCN target (carb^{R}) | SC101 | N.A. | CCA target | | |
| pBM10j | NCN target (carb^{R}) | SC101 | N.A. | CCT target | | |
| pBM10k | NCN target (carb^{R}) | SC101 | N.A. | CCC target | | |
| pBM101 | NCN target (carb^{R}) | SC101 | N.A. | CCG target | | |
| pBM10m | NCN target (carb^{R}) | SC101 | N.A. | GCA target | | |
| pBM10n | NCN target (carb^{R}) | SC101 | N.A. | GCT target | | |
| pBM10o | NCN target (carb^{R}) | SC101 | N.A. | GCC target | | |
| pBM10p | NCN target (carb^{R}) | SC101 | N.A. | GCG target | | |
| pBM22a | Window profiling | SC101 | N.A. | (TC)₁₂ target, top strand | | |
| | (carb^{R}) | | | | | |
| pBM22b | Window profiling | SC101 | N.A. | (TC)₁₃ target, top strand | | |
| | (carb^{R}) | | | | | |
| pBM22c | Window profiling | SC101 | N.A. | (TC)₁₄ target, top strand | | |
| | (carb^{R}) | | | | | |
| pBM22d | Window profiling | SC101 | N.A. | (TC)₁₅ target, top strand | | |
| | (carb^{R}) | | | | | |
| pBM22e | Window profiling | SC101 | N.A. | (TC)₁₆ target, top strand | | |
| | (carb^{R}) | | | | | |
| pBM22f | Window profiling | SC101 | N.A. | (TC)₁₇ target, top strand | | |
| | (carb^{R}) | | | | | |
| pBM22g | Window profiling | SC101 | N.A. | (TC)₁₈ target, top strand | | |
| | (carb^{R}) | | | | | |
| pBM23a | Window profiling | SC101 | N.A. | (TC)₁₂ target, bottom | | |
| | (carb^{R}) | | | strand | | |
| pBM23b | Window profiling | SC101 | N.A. | (TC)₁₃ target, bottom | | |
| | (carb^{R}) | | | strand | | |
| pBM23c | Window profiling | SC101 | N.A. | (TC)₁₄ target, bottom | | |
| | (carb^{R}) | | | strand | | |
| pBM23d | Window profiling | SC101 | N.A. | (TC)₁₅ target, bottom | | |
| | (carb^{R}) | | | strand | | |
| pBM23e | Window profiling | SC101 | N.A. | (TC)₁₆ target, botttom | | |
| | (carb^{R}) | | | strand | | |
| pBM23f | Window profiling | SC101 | N.A. | (TC)₁₇ target, bottom | | |
| | (carb^{R}) | | | strand | | |
| pBM23g | Window profiling | SC101 | N.A. | (TC)₁₈ target, bottom | | |
| | (carb^{R}) | | | strand | | |
| pBM13h | NCN assay (spec^{R}) | ColE1 | P_{BAD} | [sd2] UGI-TALE3- | P_{c} | araC |
| | | | | DddA-G1397-N wildtype | | |
| pBM13h- | window profiling (spec^{R}) | ColE1 | P_{BAD} | [sd4U] UGI-TALE3- | | |
| sd4U | | | | DddA-G1397-N wildtype | | |
| pBM13 | NCN assay (spec^{R}) | ColE1 | P_{BAD} | [sd2] UGI-TALE3- | P_{c} | araC |
| | | | | DddA-G1397-N (Q1310R + | | |
| | | | | S1330I + T1380I) | | |
| pBM13- | window profiling (spec^{R}) | ColE1 | P_{BAD} | [sd4U] UGI-TALE3- | P_{c} | araC |
| sd4U | | | | DddA-G1397-N (Q1310R + | | |
| | | | | S1330I + T1380I) | | |
| pBM13a | NCN assay (spec^{R}) | ColE1 | P_{BAD} | [sd2] UGI-TALE3- | P_{c} | araC |
| | | | | DddA-G1397-N (T1314A + | | |
| | | | | G1344R + V1364M + | | |
| | | | | E1370K + T1380I) | | |
| pBM13b | NCN assay (spec^{R}) | ColE1 | P_{BAD} | [sd2] UGI-TALE3- | P_{c} | araC |
| | | | | DddA-G1397-N (N1342S + | | |
| | | | | G1344R + V1364M + | | |
| | | | | E1370K + T1380I) | | |
| pBM13c | NCN assay (spec^{R}) | ColE1 | P_{BAD} | [sd2] UGI-TALE3- | P_{c} | araC |
| | | | | DddA-G1397-N (A1341T + | | |
| | | | | N1342S + E1370K + | | |
| | | | | T1380I) | | |
| pBM13e | NCN assay (spec^{R}) | ColE1 | P_{BAD} | [sd2] UGI-TALE3- | P_{c} | araC |
| | | | | DddA-G1397-N (T1314A + | | |
| | | | | G1344S + E1370K + | | |
| | | | | T1380I) | | |
| pBM13f | NCN assay (spec^{R}) | ColE1 | P_{BAD} | [sd2] UGI-TALE3- | P_{c} | araC |
| | | | | DddA-G1397-N (T1314A + | | |
| | | | | G1344S + E1370K + | | |
| | | | | T1380I + E1396K) | | |
| pBM13g | NCN assay (spec^{R}) | ColE1 | P_{BAD} | [sd2] UGI-TALE3- | P_{c} | araC |
| | | | | DddA-G1397-N (S1330I + | | |
| | | | | A1341V + N1342S + | | |
| | | | | E1370K + T1380I) | | |
| pBM13g- | window profiling (spec^{R}) | ColE1 | P_{BAD} | [sd4U] UGI-TALE3- | P_{c} | araC |
| sd4U | | | | DddA-G1397-N (S1330I + | | |
| | | | | A1341V + N1342S + | | |
| | | | | E1370K + T1380I) | | |
| pBM14d | NCN assay (kan^{R}) | p15A | P_{BAD} | [sd2] UGI-TALE4- | P_{c} | araC |
| | | | | DddA-G1397-C wildtype | | |
| pBM14 | NCN assay (kan^{R}) | p15A | P_{BAD} | [sd2] UGI-TALE4- | P_{c} | araC |
| | | | | DddA-G1397-C (T1413I) | | |
| pBM14c | NCN assay (kan^{R}) | p15A | P_{BAD} | [sd2] UGI-TALE4- | P_{c} | araC |
| | | | | DddA-G1397-C (A1398T + | | |
| | | | | T1413I) | | |
| pBM19 | window profiling (spec^{R}) | p15A | P_{BAD} | [sd4U] UGI-TALE4- | P_{c} | araC |
| | | | | DddA-G1397-C (T1413I) | | |
| SPBM13 | SP (none) | M13 f1 | P_{gIII} | [sd8] UGI-TALE3- | P_{BBa}_J23101 | [sd8] UGI- |
| | | | | DddA-G1397-N wildtype | | TALE3- |
| | | | | | | DddA- |
| | | | | | | G1397-C |
| | | | | | | wildtype |
| SPBM13a | SP (none) | M13 f1 | P_{gIII} | [sd8] UGI-TALE3- | P_{BBa}_J23101 | [sd8] UGI- |
| | | | | DddA-G1397-N (T1380I) | | TALE3- |
| | | | | | | DddA- |
| | | | | | | G1397-C |
| | | | | | | wildtype |
| SPBM14 | SP (none) | M13 f1 | P_{gIII} | [sd8] UGI-TALE3- | P_{BBa}_J23101 | [sd8] UGI- |
| | | | | DddA-G1397-N (E1347A) | | TALE3- |
| | | | | | | DddA- |
| | | | | | | G1397-C |
| | | | | | | wildtype |
| SPBM29 | SP (none) | M13 f1 | P_{gIII} | [sd8] UGI-TALE3- | P_{BBa}_J23101 | [sd8] UGI- |
| | | | | DddA-G1397-N (S1330I + | | TALE3- |
| | | | | A1341V + N1342S + | | DddA- |
| | | | | E1370K + T1380I) | | G1397-C |
| | | | | | | (T1413I) |

### Preparation and Transformation of Chemically Competent Cells

[0701] Strain S206034 was used in all phage propagation, plaque assays and PACE experiments. To prepare competent cells, an overnight culture was diluted 100-fold into 50 mL of 2×YT media (United States Biologicals) supplemented with tetracycline and streptomycin and grown at 37° C. with shaking at 230 RPM to OD₆₀₀˜0.4-0.6. Cells were pelleted by centrifugation at 4,000 g for 10 minutes at 4° C. The cell pellet was then resuspended by gentle stirring in 2.5 mL of ice-cold LB media (United States Biologicals) 2.5 mL of 2×TSS (LB media supplemented with 10% v/v DMSO, 20% w/v PEG 3350, and 40 mM MgCl₂) was added. The cell suspension was stirred to mix completely, aliquoted into 100-μL volumes and frozen on dry ice, and stored at −80° C. until use.

[0702] To transform cells, 100 μL of competent cells thawed on ice was added to a pre-chilled mixture of plasmid (1-2 μL each; up to 3 plasmids per transformation) in 20 μL 5×KCM solution (500 mM KCl, 150 mM CaCl₂, and 250 mM MgCl₂ in H₂O) and 80 μL H₂O, and stirred gently with a pipette tip. The mixture was incubated on ice for 20 min and heat shocked at 42° C. for 75 s before 600 μL of SOC media (New England BioLabs) was added. Cells were allowed to recover at 37° C. with shaking at 230 RPM for 1.5 h, streaked on 2×YT media+1.5% agar (United States Biologicals) plates containing the appropriate antibiotics, and incubated at 37° C. for 16-18 h.

### Bacteriophage Cloning

[0703] For USER assembly of phage, 0.25 pmol of each PCR fragment was added to a make up a final volume of 25 μL. Following USER assembly, the 25 μL USER reaction was transformed into 100 μL chemicompetent S2060 E. coli host cells containing plasmid pJC175e²³ that was modified to include constitutive DddI expression to minimize potential toxicity arising from split DddA expression in bacteria. This plasmid is referred to as pJC175e-DddI. Cells transformed with pJC175e-DddI enables activity-independent phage propagation and were grown overnight at 37° C. with shaking in antibiotic-free 2×YT media. Bacteria were then centrifuged for 2 min at 9,000 g and were plaqued as described below. Individual phage plaques were grown in DRM media (prepared from US Biological CS050H-001/CS050H-003) until the bacteria reached the late growth phase (˜8 hours). Bacteria were centrifuged for 2 min at 9,000 g and the supernatants containing phage were filtered through 0.22 m PVDF Ultrafree centrifugal filter (Millipore) to remove residual bacteria and stored at 4° C.

### Plaque Assays for Phage Titer Quantification and Phage Cloning

[0704] Phage were plaqued on S2060³⁴ E. coli host cells containing plasmid pJC175e-DddI (for activity-independent propagation)²³ or host cells transformed with AP and CP for activity dependent propagation (see Table 4 for list of plasmids used in this Example). To prepare a cell stock for plaquing, an overnight culture of host cells (fresh or stored at 4° C. for up to ˜1 week) was diluted 50-fold in 2×YT medium containing appropriate antibiotics and cells were grown at 37° C. to an OD₆₀₀ of 0.8-1.0. Serial dilutions of phage (ten-fold) were made in 2×YT media. To prepare plates, molten 2×YT medium agar (1.5% agar, 55° C.) was mixed with Bluo-gal (4% w/v in DMF) to a final concentration of 0.08% Bluo-gal. The molten agar mixture was pipetted into quadrants of quartered Petri dishes (1.5 mL per quadrant) or wells of a 12-well plate (˜1 mL per well) and was allowed to set. To prepare top agar, a 3:2 mixture of 2×YT medium and molten 2×YT medium agar (1.5%, resulting in a 0.6% agar final concentration) was prepared. To plaque, cell stock (100 or 150 μL for a 12-well plate or Petri dish, respectively) and phage (10 μL) were mixed in 2 mL library tubes (VWR International), and 55° C. top agar was added (400 or 1,000 μL for a 12-well plate or Petri dish, respectively) and mixed one time by pipetting up and down, and then the mixture was immediately pipetted onto the solid agar medium in one well of a 12-well plate or one quadrant of a quartered Petri dish. Top agar was allowed to set undisturbed for 2 min at 25° C., then plates or dishes were incubated, without inverting, at 37° C. overnight. Phage titers were determined by quantifying blue plaques.

### Phage Propagation Assays

[0705] S2060 cells transformed with AP and CP plasmids of interest were prepared as described above and were inoculated in DRM. Host cells from an overnight culture in DRM were diluted 50-fold into fresh DRM and were grown at 37° C. to an OD₆₀₀ of 0.3-0.4. Previously titered phage stocks were added to 1 mL of bacterial culture at a final concentration of ˜105 p.f.u. mL⁻¹. The cultures were grown overnight with shaking at 37° C. and were then centrifuged at 4,000 g for 10 min to remove cells. The supernatants were titered by plaquing as described above. Fold enrichment was calculated by dividing the titer of phage propagated on host cells by the titer of phage at the same input concentration shaken overnight in DRM without host cells.

### Phage-Assisted Non-Continuous Evolution Experiments

[0706] Host cells transformed with AP and CP were made chemically competent as described above. Chemically competent host cells were transformed with mutagenesis plasmid MP6²⁴ and plated on 2×YT agar containing 10 mM glucose along with appropriate concentrations of antibiotics. Four colonies were picked into 1 mL DRM each in a 96-well deep well plate, and this was diluted 5-fold eight times serially into DRM. The plate was sealed with a porous sealing film and grown at 37° C. with shaking at 230 RPM for 16-18 h. Dilutions with OD600 ˜0.3-0.4 were then treated with 10 mM arabinose to induce mutagenesis. Treated cultures were split into the desired number of 1 mL cultures in a 96-well plate, and inoculated with selection phage at the indicated dilution (see FIG. 23C, FIGS. 25C-25E and FIG. 31D). Infected cultures were grown for 16-18 h at 37° C. and harvested the next day via centrifugation at 4,000×g for 10 min. Supernatant containing evolved phage was isolated and stored at 4° C. Isolated phage were then used to infect the next passage and the process repeated for the duration of the selection. Phage titers were determined by plaque assay.

### Phage-Assisted Continuous Evolution

[0707] Unless otherwise noted, PACE apparatus, including host cell strains, lagoons, chemostats, and media, were all used as previously described³⁵. Host cells were prepared as described for PANCE above. Four colonies were picked into 1 mL DRM each in a 96-well deep well plate, and this was diluted 5-fold eight times serially into DRM. The plate was sealed with a porous sealing film and grown at 37° C. with shaking at 230 RPM for 16-18 h. Dilutions with OD₆₀₀ ˜0.4-0.8 were then used to inoculate a chemostat containing 80 mL DRM. The chemostat was grown to OD₆₀₀ ˜0.6-0.8, then continuously diluted with fresh DRM at a rate of 1-1.5 chemostat volumes/h to keep the cell density roughly constant. The chemostat was maintained at a volume of 60-80 mL.

[0708] Prior to SP infection, lagoons were continuously diluted with culture from the chemostat at 1 lagoon volume/h and pre-induced with 10 mM arabinose for at least 2 h. Lagoons were infected with SP at a starting titer of 10⁷ pfu/mL and maintained at a volume of 15 mL. Samples (500 μL) of the SP population were taken at indicated times from lagoon waste lines. These were centrifuged at 9,000 g for 2 min, and the supernatant was stored at 4° C. Lagoon titers were determined by plaque assays using S2060 cells transformed with pJC175e-DddI. For Sanger sequencing of lagoons, single plaques were PCR amplified using primers AB1793 (5′-TAATGGAAACTTCCTCATGAAAAAGTCTTTAG (SEQ ID NO: 235)) and AB1396 (5′-ACAGAGAGAATAACATAAAAACAGGGAAGC (SEQ ID NO: 236)) to amplify UGI-TALE3-DddA-G1397-N; Primers AR163 (5′-CCAGCAAGGCCGATAGTTTG (SEQ ID NO: 237)) and AR611 (5′-CTAGCTGATAAATTCATGCCAG (SEQ ID NO: 238)) amplified UGI-TALE3-DddA-G1397-C. Both sets of primers anneal to regions of the phage backbone flanking the evolving gene of interest. Generally, eight plaques were picked and sequenced per lagoon. Mutation analyses were performed using Mutato. Mutato is available as a Docker image at hub.docker.com/r/araguram/mutato

[0709] See Sequences, below for sequences of all evolved DddA variants.

### Evolution of Canonical T7-DdCBE for Improved TC Activity

[0710] Host cells transformed with AP2, CP2-TCC and MP6 were maintained in an 80 mL chemostat. Four lagoons were each infected with SPBM13a (see Table 4). Upon infection, lagoon dilution rates were increased to 1.5 volume/h. Lagoon dilution rates were increased to 2 vol/h at 20 h and 3 vol/h at 67 h. The experiment ended at 139 h.

### Evolution of T7-DdCBE-CCC-B for Broadened Targeting Scope

[0711] Host cells transformed with APi, CP2-CCC and MP6 were maintained in a 50 mL chemostat. Two lagoons were each infected with phage pool CCC-B derived from PANCE. Upon infection, lagoon dilution rates were increased to 1.5 volume/h. Lagoon dilution rates were increased to 2.5 vol/h at 19 h, 3 vol/h at 66 h and 3.5 vol/h at 114h. The experiment ended at 138 h.

### Evolution of T7-DdCBE-GCC-A and T7-DdCBE-GCC-D for Broadened Targeting Scope

[0712] Host cells transformed with APi, CP2-GCC and MP6 were maintained in a 50 mL chemostat. One lagoon was infected with phage pool GCC-A and a separate lagoon was infected with phage pool GCC-D. Both phage pools were derived from PANCE. Upon infection, lagoon dilution rates were increased to 1.5 volume/h. Lagoon dilution rates were increased to 2 vol/h at 66 h, 2.5 vol/h at 90 h and 3 vol/h at 114h. The experiment ended at 138 h.

### Bacterial Plasmid Profiling Assay for Context Preference and Editing Window Profiling

[0713] To generate NCN target library, 16 μL of plasmids pBM10a to pBM10p were pooled (˜100-200 ng/μL, 1 μL each) and added to 100 μl NEB 10-beta electrocompetent E. coli. To generate TC repeat library for profiling the editing window, 14 μl of plasmids pBM22a-g and pBM23a-g were pooled (˜100-200 ng/μL, 1 μL each) and added to 100 μl NEB 10-beta electrocompetent E. coli. The resulting mixture was incubated on ice for 15 min before transferring into 4×25 μL aliquots in a pre-chilled 16-well Nucleocuvette strip. E. coli cells were electroporated with a Lonza 4D-Nucleofector System using bacterial program X-13. Freshly electroporated E. coli was immediately recovered in 1.4 mL pre-warmed NEB Outgrowth media and incubated with shaking at 200 rpm for 1 h. After recovery, the 1.5 mL culture was divided into two 750 μL aliquots for plating on two 245 mm square dishes (Corning) containing 2×YT medium agar (1.5% agar) mixed with 100 μg/mL of carbenicillin for plasmid maintenance. The dishes were incubated, without inverting, at 37° C. overnight. Colonies were scrapped from the plate the following day and resuspended in 50 mL of 2×YT media. The plasmid library was isolated with a Qiagen Midiprep Kit according to manufacturer's instructions and was eluted in 100 μL H₂O.

[0714] To generate the T7-DdCBE-expressing host cells, ˜20-50 μL of NEB 10-beta chemically competent E. coli was transformed with a plasmid from the pBM13 series to express the left-side TALE and a plasmid from the pBM14 series to express the right-side TALE (see Table 4), according to manufacturer's instructions. Cells were plated on 2×YT medium agar (1.5% agar) mixed with 50 μg/mL of spectinomycin, 50 μg/mL of kanamycin and 25 mM glucose. Glucose was added to minimize leaky expression of DdCBE. To make electrocompetent host cells, a single colony of DdCBE-expressing host cells was inoculated in 5-10 mL DRM media and grown at 37° C. with shaking at 200 rpm Cells were grown to OD₆₀₀ ˜0.4, chilled on ice for ˜10 min before centrifuging at 4,000 g for 10 min. Supernatant was discarded and the cell pellet was resuspended with 500-1000 μL of ice-cold 10% glycerol. The process was repeated for four glycerol washes. On the last wash, cells were resuspended in 50 μL of 10% glycerol, mixed with 2 μL of NCN target library (20 ng total) and incubated on ice for 5 min. Cells were transferred into a pre-chilled 16-well Nucleocuvette strip (50 μL per well) and electroporated with a Lonza 4D-Nucleofector System using bacterial program X-5. Freshly electroporated E. coli was immediately recovered in 750 μL of pre-warmed NEB Outgrowth media and recovered by shaking at 200 rpm for 10 min. After recovery, 20-40 mL of DRM was added with 100 μg/mL of carbenicillin, 50 μg/mL of spectinomycin, 50 μg/mL of kanamycin and 10 mM arabinose (to induce DdCBE expression). Cells were incubated with shaking at 200 rpm overnight. Library and base editor plasmids were isolated with a Qiagen Midiprep Kit according to manufacturer's instructions and was eluted in 100 μL H₂O.

### General Mammalian Cell Culture Condition

[0715] HEK293T (ATCC CRL-3216), U20S (ATTC HTB-96), K562 (CCL-243) and HeLa (CCL-2) cells were purchased from ATCC and cultured and passaged in Dulbecco's modified Eagle's medium (DMEM) plus GlutaMAX (ThermoFisher Scientific), McCoy's 5A medium (Gibco), RPMI medium 1640 plus GlutaMAX (Gibco), or DMEM plus GlutaMAX (ThermoFisher Scientific), respectively, each supplemented with 10% (v/v) fetal bovine serum (Gibco, qualified). Cells were incubated, maintained, and cultured at 37° C. with 5% CO₂. Cell lines were authenticated by their respective suppliers and tested negative for mycoplasma.

### HEK293T Human Cell Lipofection

[0716] Cells were seeded on 48-well collagen-coated plates (Corning) at a density of 1.6- to 2×10⁵ cells/mL 18-24 hours before lipofection in a volume of 250 μl per well. Lipofection was performed at a cell density of approximately 70%. For DdCBE experiments, cells were transfected with 500 ng of each mitoTALE monomer to make up 1000 ng of total plasmid DNA. Lipofectamine 2000 (1.2 μL; ThermoFisher Scientific) was used per well. Cells were harvested 72 h after lipofection for genomic DNA extraction. Unless stated otherwise, the architecture of each DdCBE half is MTS-TALE-[DddA half]-2-amino-acid linker-UGI (see Table 5 for list of TALE binding sites and Sequences, below, for DdCBE sequences).

TABLE 5
List of DNA sequences recognized by TALE proteins

| | | Left | | Right |
|---|---|---|---|---|
| | | SEQ ID | | SEQ ID |
| DdCBE | Left-TALE target sequence | NO: | Right-TALE target sequence | NO: |
| T7 | 5′-T CCGACTTCGCGTT | 351 | 5′-T CGTCGTTTGCT | 364 |
| ND1.1 | 5′-T CTAGCCTAGCCGTTT-3′ | 352 | 5′-T GAGTTTGATGCTCACCCT-3′ | 365 |
| ND1.2 | 5′-T CCTAATGCTT-3′ | 353 | 5′-T ATATAGCCTAGA-3′ | 366 |
| ND2 | 5′-T CTTAGCATACTCCTCAAT-3′ | 354 | 5′-T AGAACTGCTATTATT-3′ | 367 |
| ND4 | 5′-T GCTAGTAACCACGTTCT-3′ | 355 | 5′-T CCTGTAAGTAGGAGAGT-3′ | 368 |
| ND4.2 | 5′-T GAAGCTTCACC-3′ | 356 | 5′-T GGGCGATTATGA-3′ | 369 |
| ND4.3 | 5′-T CTTCAATCAGCC-3′ | 357 | 5′-T GGCTGTTACT-3′ | 370 |
| ND5.2 | 5′-T CAAAACCATACCTCT-3′ | 358 | 5′-T GCTAGGCTGCCAATGT-3′ | 371 |
| (mismatched) | | | | |
| ND5.2 (no | 5′-T CAAAACCATACCTCT-3′ | 358 | 5′-T GCTAGGCTGCCAATGG-3′ | 372 |
| mismatch) | | | | |
| ND5.4 | 5′-T CATAATAGTTACAA-3′ | 359 | 5′-T GCTAGGTGT-3′ | 373 |
| ATP8 | 5′-T ATTAAACACAAACTAT-3′ | 360 | 5′-T ATGGGCTTTGGT-3′ | 374 |
| (mismatched) | | | | |
| ATP8 (no | 5′-T ATTAAACACAAACTAC-3′ | 361 | 5′-T ATGGGCTTTGGT-3′ | 374 |
| mismatch) | | | | |
| ND5.4 | 5′-T CATAATAGTTACAA-3′ | 359 | 5′-T GCTAGGTGT-3′ | 373 |
| SIRT6 | 5′-T TACGCGGCGGGGCTGTC-3′ | 362 | 5′-T CCGGGAGGCCGCACTTG-3′ | 375 |
| JAK2 | 5′-T CTGAAAAAGACTCTGCA-3′ | 363 | 5′-T CCATTTCTGTCATCGTA-3′ | 376 |

### Fluorescence-Activated Cell Sorting (FACS)

[0717] Cells treated with the DddA11 variant of ND4.2-DdCBE or ND5.4-DdCBE were seeded on six-well plates (Corning) at a density of 1.8×10⁵ cells/mL 18-24 hours before lipofection in a volume of 2 mL per well. Cells were transfected with 1.25 μg of each mitoTALE monomer to make up 2.5 μg of total plasmid DNA. Lipofectamine 2000 (10 μL; ThermoFisher Scientific) was used per well. Medium was removed 72 h after lipofection, and cells were washed once with 1×Dulbecco's phosphate-buffered saline (ThermoFisher Scientific). Cells were trypsinzed (400 μL; Gibco) and quenched with DMEM media (2 mL). Media was aspirated and cells were resuspended in 1×PBS, filtered through a cell strainer (BD Biosciences), and sorted using a LE-MA900 cell sorter (Sony). See FIGS. 41A-41D for representative FACS sorting examples and Sequences, below, for sequences of P2A linker, eGFP and mCherry.

### U2OS, K562 and HeLa Human Cell Nucleofection

[0718] Nucleofection was used for transfection in all experiments using K562, HeLa, and U20S cells. 125 ng of each DdCBE expression plasmid (total 250 ng plasmid) was nucleofected in a final volume of 20 μl in a 16-well nucleocuvette strip (Lonza). K562 cells were nucleofected using the SF Cell Line 4D-Nucleofector X Kit (Lonza) with 5×10⁵ cells per sample (program FF-120), according to the manufacturer's protocol. U20S cells were nucleofected using the SE Cell Line 4D-Nucleofector X Kit (Lonza) with 4×10⁵ cells per sample (program DN-100), according to the manufacturer's protocol. HeLa cells were nucleofected using the SE Cell Line 4D-Nucleofector X Kit (Lonza) with 2×10⁵ cells per sample (program CN-114), according to the manufacturer's protocol. Cells were harvested 72 h after nucleofection for genomic DNA extraction.

Genomic DNA Isolation from Mammalian Cell Culture

[0719] Medium was removed, and cells were washed once with 1×Dulbecco's phosphate-buffered saline (ThermoFisher Scientific). Genomic DNA extraction was performed by addition of 40-50 μL freshly prepared lysis buffer (10 mM Tris-HCl (pH 8.0), 0.05% SDS, and proteinase K (20 μg/mL; ThermoFisher Scientific)) directly into the 48-well culture well. The extraction solution was incubated at 37° C. for 60 min and then 80° C. for 20 min. Resulting genomic DNA was subjected to bead cleanup with AMPure DNAdvance beads according to manufacturer's instructions (Beckman Coulter A48705).

### High-Throughput DNA Sequencing of Genomic DNA Samples

[0720] Genomic sites of interest were amplified from genomic DNA samples and sequenced on an Illumina MiSeq as previously described¹⁷. Amplification primers containing Illumina forward and reverse adapters (Table 6) were used for a first round of PCR (PCR 1) to amplify the genomic region of interest. Briefly, 1 μL of purified genomic DNA was used as input into the first round of PCR (PCR1). For PCR1, DNA was amplified to the top of the linear range using Phusion Hot Start II High-Fidelity DNA Polymerase (ThermoFisher Scientific), according to the manufacturer's instructions but with the addition of 0.5×SYBR Green Nucleic Acid Gel Stain (Lonza) in each 25 μL reaction. For all amplicons, the PCR1 protocol used was an initial heating step of 2 min at 98° C. followed by an optimized number of amplification cycles (10 s at 98° C., 20 s at 62° C., 30 s at 72° C.). Quantitative PCR was performed to determine the optimal cycle number for each amplicon. The number of cycles needed to reach the top of the linear range of amplification are ˜17-19 cycles for mtDNA amplicons and ˜27-28 cycles for nuclear DNA amplicons. Barcoding PCR2 reactions (25 μL) were performed with 1 μL of unpurified PCR1 product and amplified with Phusion Hot Start II High-Fidelity DNA Polymerase (ThermoFisher Scientific) using the following protocol 98° C. for 2 min, then 10 cycles of [98° C. for 10 s, 61° C. for 20 s, and 72° C. for 30 s], followed by a final 72° C. extension for 2 min. PCR products were evaluated analytically by electrophoresis in a 1.5% agarose gel. After PCR2, up to 300 samples with different barcode combinations were combined and purified by gel extraction using the QIAquick Gel Extraction Kit (QIAGEN). DNA concentration was quantified using the Qubit ssDNA HS Assay Kit (Thermo Fisher Scientific) to make up a 4 nM library. The library concentration was further verified by qPCR (KAPA Library Quantification Kit-Illumina, KAPA Biosystems) and sequenced using an Illumina MiSeq with 210- to 300-bp single-end reads. Sequencing results were computed with a minimum sequencing depth of approximately 10,000 reads per sample.

TABLE 6
Primers used for mammalian and bacteria cell genomic DNA amplification at sites targeted
by DdCBEs

| | | Forward | | Reverse |
|---|---|---|---|---|
| | | SEQ ID | | SEQ ID |
| Site | HTS forward primer | NO: | HTS reverse primer | NO: |
| ND1.1 | ACACTCTTTCCCTACACGACGCTCT | 239 | TGGAGTTCAGACGTGTGCTCTT | 269 |
| | TCCGATCTNNNNCTCACCATCGCT | | CCGATCTGGCTAGGGTGACTTC | |
| | CTTCTACTATG | | ATATGAG | |
| ND1.2 | ACACTCTTTCCCTACACGACGCTCT | 240 | TGGAGTTCAGACGTGTGCTCTT | 270 |
| | TCCGATCTNNNNGCCAACCTCCTA | | CCGATCTGGGCGGTGATGTAGA | |
| | CTCCTCAT | | GGG | |
| ND2 | ACACTCTTTCCCTACACGACGCTCT | 241 | TGGAGTTCAGACGTGTGCTCTT | 271 |
| | TCCGATCTNNNNCGTAAGCCTTCT | | CCGATCTGTTGAGTAGTAGGAA | |
| | CCTCACT | | TGCGGTAG | |
| ND4 | ACACTCTTTCCCTACACGACGCTCT | 242 | TGGAGTTCAGACGTGTGCTCTT | 272 |
| | TCCGATCTNNNNGACTTCAAACTC | | CCGATCTGTTGTGGTAAATATG | |
| | TACTCCCACTAATAG | | TAGAGGGAG | |
| ND4.2 | ACACTCTTTCCCTACACGACGCTCT | 243 | TGGAGTTCAGACGTGTGCTCTT | 273 |
| ND4.3 | TCCGATCTNNNNCTGCCTACGACA | | CCGATCTTGGGAGTAGAGTTTG | |
| | AACAGACC | | AAGTCC | |
| ND5.2 | ACACTCTTTCCCTACACGACGCTCT | 244 | TGGAGTTCAGACGTGTGCTCTT | 274 |
| | TCCGATCTNNNNCGGGTCCATCAT | | CCGATCTAGAGTAATAGATAGG | |
| | CCACAAC | | GCTCAGGC | |
| ND5.4 | ACACTCTTTCCCTACACGACGCTCT | 245 | TGGAGTTCAGACGTGTGCTCTT | 275 |
| | TCCGATCTNNNNGCAGTCTGCGCC | | CCGATCTCGAATATCTTGTTCAT | |
| | CTTAC | | TGTTAAGGTTG | |
| ATP8 | ACACTCTTTCCCTACACGACGCTCT | 246 | TGGAGTTCAGACGTGTGCTCTT | 276 |
| | TCCGATCTNNNNCTTTACAGTGAA | | CCGATCTGGGGGCAATGAATGA | |
| | ATGCCCCAAC | | AGCG | |
| SIRT6 (on- | ACACTCTTTCCCTACACGACGCTCT | 247 | TGGAGTTCAGACGTGTGCTCTT | 277 |
| target) | TCCGATCTNNNNGGAAGCGGCCTC | | CCGATCTGCCCCCTGATATTCC | |
| | AACAAG | | CAC | |
| JAK2 (on- | ACACTCTTTCCCTACACGACGCTCT | 248 | TGGAGTTCAGACGTGTGCTCTT | 278 |
| target) | TCCGATCTNNNNGCTAGGATTACA | | CCGATCTCACCTGAAGAACTGG | |
| | GGTGTGAGAC | | ATCTATTTG | |
| T7-DdCBE (for | ACACTCTTTCCCTACACGACGCTCT | 249 | TGGAGTTCAGACGTGTGCTCTT | 279 |
| targeting NCN | TCCGATCTNNNNCGTTTTAGACTG | | CCGATCTCGGATGCCGGGAGC | |
| library plasmid | AGCACGTCAATAC | | | |
| SIRT6-CT1 | ACACTCTTTCCCTACACGACGCTCT | 250 | TGGAGTTCAGACGTGTGCTCTT | 280 |
| | TCCGATCTNNNNTGGCCAAGCAGG | | CCGATCTCTGTTGCCTCCTTGGG | |
| | GATC | | TAC | |
| SIRT6-CT2 | ACACTCTTTCCCTACACGACGCTCT | 251 | TGGAGTTCAGACGTGTGCTCTT | 281 |
| | TCCGATCTNNNNGGGGGAGTCGGA | | CCGATCTCTTGGCACACAGCAG | |
| | CTTAGAAGG | | GTGCTC | |
| SIRT6-CT3 | ACACTCTTTCCCTACACGACGCTCT | 252 | TGGAGTTCAGACGTGTGCTCTT | 282 |
| | TCCGATCTNNNNTGCTAGGCCCCG | | CCGATCTCCCCACTTCCTTCCTC | |
| | ATTTGTGG | | ACCCT | |
| SIRT6-CT4 | ACACTCTTTCCCTACACGACGCTCT | 253 | TGGAGTTCAGACGTGTGCTCTT | 283 |
| | TCCGATCTNNNNGACCCTTCCATT | | CCGATCTGCTCTGGCTGGAGCA | |
| | AGATCTGAGGGC | | CAGGAA | |
| SIRT6-CT5 | ACACTCTTTCCCTACACGACGCTCT | 254 | TGGAGTTCAGACGTGTGCTCTT | 284 |
| | TCCGATCTNNNNGGATCCAAGGTG | | CCGATCTACCACAGAGCCTCAC | |
| | CCTTCACCC | | CCACCA | |
| SIRT6-CT6 | ACACTCTTTCCCTACACGACGCTCT | 255 | TGGAGTTCAGACGTGTGCTCTT | 285 |
| | TCCGATCTNNNNGCTGGATTCGAT | | CCGATCTCAGGCCCTACTGGGA | |
| | CTGAGGTCAGCT | | CGAACA | |
| SIRT6-CT7 | ACACTCTTTCCCTACACGACGCTCT | 256 | TGGAGTTCAGACGTGTGCTCTT | 286 |
| | TCCGATCTNNNNCCCAGGACAAAG | | CCGATCTCTCTTGCACAAGGTT | |
| | TTGCTTTGGGGC | | GCCACCTC | |
| SIRT6-CT8 | ACACTCTTTCCCTACACGACGCTCT | 257 | TGGAGTTCAGACGTGTGCTCTT | 287 |
| | TCCGATCTNNNNGCCTCGCCAAGA | | CCGATCTATTCCGGGTAGGCGA | |
| | AACGCCCAT | | GGAGGT | |
| SIRT6-CT9 | ACACTCTTTCCCTACACGACGCTCT | 258 | TGGAGTTCAGACGTGTGCTCTT | 288 |
| | TCCGATCTNNNNCCAGCACACCCT | | CCGATCTAGGGCCCCAGTGAGT | |
| | GATAAGC | | G | |
| SIRT6-CT10 | ACACTCTTTCCCTACACGACGCTCT | 259 | TGGAGTTCAGACGTGTGCTCTT | 289 |
| | TCCGATCTNNNNCCAGGGCAACAG | | CCGATCTGCCCACATCAGCTCT | |
| | GTTTAAG | | GC | |
| JAK2-CT1 | ACACTCTTTCCCTACACGACGCTCT | 260 | TGGAGTTCAGACGTGTGCTCTT | 290 |
| | TCCGATCTNNNNGTGTGGTCAGGA | | CCGATCTCTCCAGCCTGGGCGA | |
| | CAAACTGTTCCC | | CTGAAT | |
| JAK2-CT2 | ACACTCTTTCCCTACACGACGCTCT | 261 | TGGAGTTCAGACGTGTGCTCTT | 291 |
| | TCCGATCTNNNNGGGGCTGGGAGA | | CCGATCTCCACTGATAACCTAT | |
| | AGAGAGGAA | | GCCCAGGA | |
| JAK2-CT3 | ACACTCTTTCCCTACACGACGCTCT | 262 | TGGAGTTCAGACGTGTGCTCTT | 292 |
| | TCCGATCTNNNNGTCCACTCTGTG | | CCGATCTCTATGGAGACTCCTT | |
| | TTACCCAGATC | | CAGGTCTTTTTTCCC | |
| JAK2-CT4 | ACACTCTTTCCCTACACGACGCTCT | 263 | TGGAGTTCAGACGTGTGCTCTT | 293 |
| | TCCGATCTNNNNGCCGGTTTAGGT | | CCGATCTGAGTGAGACCCTGTC | |
| | ATGGGAACCAC | | TTGGGGA | |
| JAK2-CT5 | ACACTCTTTCCCTACACGACGCTCT | 264 | TGGAGTTCAGACGTGTGCTCTT | 294 |
| | TCCGATCTNNNNGGAACAGTGATC | | CCGATCTGGCTCTGAAGAAAGT | |
| | AGTTCTGTTACCTGAC | | ACGTAAAAGACCAAG | |
| JAK2-CT6 | ACACTCTTTCCCTACACGACGCTCT | 265 | TGGAGTTCAGACGTGTGCTCTT | 295 |
| | TCCGATCTNNNNTCCGGATTCTCC | | CCGATCTCCCAGGACAGCTTTG | |
| | TGCTGAGGC | | AATGTGGC | |
| JAK2-CT7 | ACACTCTTTCCCTACACGACGCTCT | 266 | TGGAGTTCAGACGTGTGCTCTT | 296 |
| | TCCGATCTNNNNCCGACTGCTCTG | | CCGATCTGCCCATGTATTGGGG | |
| | CCTTCTGA | | CATAACC | |
| JAK2-CT8 | ACACTCTTTCCCTACACGACGCTCT | 267 | TGGAGTTCAGACGTGTGCTCTT | 297 |
| | TCCGATCTNNNNGTCCATGAATGA | | CCGATCTGCTCTGGCTCTTGCA | |
| | CAGAGCAC | | GAC | |
| JAK2-CT9 | ACACTCTTTCCCTACACGACGCTCT | 268 | TGGAGTTCAGACGTGTGCTCTT | 298 |
| | TCCGATCTNNNNGTAAGGGTGAAA | | CCGATCTCAAGTTCCTGGAATG | |
| | ATTCATTTGATGG | | CTGCATG | |

### High-Throughput Sequencing of NCN and TC Repeat Library Plasmids

[0721] Primers T7-DdCBE Fwd and T7-DdCBE Rev were used to amplify the region containing the NCN target spacing region (see Table 6). Briefly, 100 ng of purified plasmids were used as input into the first round of PCR (PCR1) in a total reaction volume of 50 μL. For PCR1, quantitative PCR was used to amplify DNA to the top of the linear range as described above (˜14 cycles). PCR1 products were purified with QIAquick PCR Purification kit according to manufacturer's instructions and eluted in 20 μL. Barcoding PCR2 reactions (50 μL) were performed with 10 μL of purified PCR1 product and amplified for 8 cycles. Subsequent steps after PCR2 are as described above.

### Analysis of HTS Data for DNA Sequencing and Targeted Amplicon Sequencing

[0722] Sequencing reads were demultiplexed using MiSeq Reporter (Illumina). Batch analysis with CRISPResso2³⁶ was used for targeted amplicon and DNA sequencing analysis (see Table 7 for list of amplicon sequences used for alignment. A 10-bp window was used to quantify indels centered around the middle of the dsDNA spacing. To set the cleavage offset, a hypothetical 15- or 16-bp spacing region has a cleavage offset of −8. Otherwise, the default parameters were used for analysis. The output file “Reference.NUCLEOTIDE_PERCENTAGE_SUMMARY.txt” was imported into Microsoft Excel for quantification of editing frequencies. Reads containing indels within the 10-bp window are excluded for calculation of editing frequencies. The output file “CRISPRessoBatch_quantification_of_editing_frequency.txt” was imported into Microsoft Excel for quantification of indel frequencies. Indel frequencies were computed by dividing the sum of Insertions and Deletions over the total number of aligned reads.

TABLE 7
Amplicons for high-throughput sequencing analyses

| | | SEQ ID |
|---|---|---|
| Site | Amplicon | NO: |
| ND1 | CTCACCATCGCTCTTCTACTATGAACCCCCCTCCCCATACCCAACCCCCTGGT | 299 |
| | CAACCTCAACCTAGGCCTCCTATTTATTCTAGCCACCTCTAGCCTAGCCGTTT | |
| | ACTCAATCCTCTGATCAGGGTGAGCATCAAACTCAAACTACGCCCTGATCGG | |
| | CGCACTGCGAGCAGTAGCCCAAACAATCTCATATGAAGTCACCCTAGCC | |
| ND1.2 | GCCAACCTCCTACTCCTCATTGTACCCATTCTAATCGCAATGGCATTCCTAAT | 300 |
| | GCTTACCGAACGAAAAATTCTAGGCTATATACAACTACGCAAAGGCCCCAAC | |
| | GTTGTAGGCCCCTACGGGCTACTACAACCCTTCGCTGACGCCATAAAACTCTT | |
| | CACCAAAGAGCCCCTAAAACCCGCCACATCTACCATCACCCTCTACATCACC | |
| | GCCC | |
| ND2 | CGTAAGCCTTCTCCTCACTCTCTCAATCTTATCCATCATAGCAGGCAGTTGAG | 301 |
| | GTGGATTAAACCAAACCCAGCTACGCAAAATCTTAGCATACTCCTCAATTAC | |
| | CCACATAGGATGAATAATAGCAGTTCTACCGTACAACCCTAACATAACCATT | |
| | CTTAATTTAACTATTTATATTATCCTAACTACTACCGCATTCCTACTACTCAAC | |
| ND4 | GACTTCAAACTCTACTCCCACTAATAGCTTTTTGATGACTTCTAGCAAGCCTC | 302 |
| | GCTAACCTCGCCTTACCCCCCACTATTAACCTACTGGGAGAACTCTCTGTGCT | |
| | AGTAACCACGTTCTCCTGATCAAATATCACTCTCCTACTTACAGGACTCAACA | |
| | TACTAGTCACAGCCCTATACTCCCTCTACATATTTACCACAAC | |
| ND4.2 | CTGCCTACGACAAACAGACCTAAAATCGCTCATTGCATACTCTTCAATCAGCC | 303 |
| ND4.3 | ACATAGCCCTCGTAGTAACAGCCATTCTCATCCAAACCCCCTGAAGCTTCACC | |
| | GGCGCAGTCATTCTCATAATCGCCCACGGACTTACATCCTCATTACTATTCTG | |
| | CCTAGCAAACTCAAACTACGAACGCACTCACAGTCGCATCATAATCCTCTCTC | |
| | AAGGACTTCAAACTCTACTCCCA | |
| ND5.2 | CGGGTCCATCATCCACAACCTTAACAATGAACAAGATATTCGAAAAATAGGA | 304 |
| | GGACTACTCAAAACCATACCTCTCACTTCAACCTCCCTCACCATTGGCAGCCT | |
| | AGCATTAGCAGGAATACCTTTCCTCACAGGTTTCTACTCCAAAGACCACATCA | |
| | TCGAAACCGCAAACATATCATACACAAACGCCTGAGCCCTATCTATTACTCT | |
| ND5.4 | GCAGTCTGCGCCCTTACACAAAATGACATCAAAAAAATCGTAGCCTTCTCCA | 305 |
| | CTTCAAGTCAACTAGGACTCATAATAGTTACAATCGGCATCAACCAACCACA | |
| | CCTAGCATTCCTGCACATCTGTACCCACGCCTTCTTCAAAGCCATACTATTTA | |
| | TGTGCTCCGGGTCCATCATCCACAACCTTAACAATGAACAAGATATTCG | |
| ATP8 | CTTTACAGTGAAATGCCCCAACTAAATACTACCGTATGGCCCACCATAATTAC | 306 |
| | CCCCATACTCCTTACACTATTCCTCATCACCCAACTAAAAATATTAAACACAA | |
| | ACTACCACCTACCTCCCTCACCAAAGCCCATAAAAATAAAAAATTATAACAA | |
| | ACCCTGAGAACCAAAATGAACGAAAATCTGTTCGCTTCATTCATTGCCCCC | |
| SIRT6 | GGAAGCGGCCTCAACAAGGGAAACTTTATTGTTCCCGTGGGGCAGTCGAGGA | 307 |
| (on-target) | TGTCGGTGAATTACGCGGCGGGGCTGTCGCCGTACGCGGACAAGGGCAAGTG | |
| | CGGCCTCCCGGAGGTGAGCGCGTCTGAGGGTCCCGAGCATCGCGCCCCAGGG | |
| | CCGCGGGCTGGGAGCGGCCGGATGGCAGGGGGGCATTGTGGGAATATCAGG | |
| | GGGC | |
| JAK2 (on- | GCTAGGATTACAGGTGTGAGACACTGCGCCCAGCCCATTTGTAACTTTATTGT | 308 |
| target) | TTTCTCTTACAGGCAAATGTTCTGAAAAAGACTCTGCATGGGAATGGCCTGCC | |
| | TTACGATGACAGAAATGGAGGGAACATCCACCTCTTCTATATATCAGAATGG | |
| | TGATATTTCTGGAAATGCCAATTCTATGAAGCAAATAGATCCAGTTCTTCAGG | |
| | TG | |
| pBM10 | CGTTTTAGACTGAGCACGTCAATACGCAAACCGCCTCTCCCCGCGCGTTGGCC | 309 |
| plasmid | GATTCATTAATGCAGCTGGCACGACAGGTTTCCCGACTGGAGTTTGTAGTCTA | |
| series for | GTCTGTCCGACTTCGCGTTTTTTTTGTTTATTTCAGCAAACGACGAACCCGC | |
| NCN | CAAACGCGCCCTGACGGGATTGTCTGCTCCCGGCATCCG | |
| library | Blue = UMI; Bold = TALE binding sites; Underlined = NCN target | |
| SIRT6- | TGGCCAAGCAGGGATCACGTCCCTCTGCCTTGGCCACTCCAGGCCACCTGCA | 310 |
| CT1 | GAGGGGGCAGCCCTGTCAGTGATGGAGGGGGAGACAGCCTGTGTTATTCACG | |
| | CCGGAAGTCCATGGCATTCTCAGAGAGCTCTTCCCCGTACCTCCCCAGAACAC | |
| | TGAGAATGGATGAATCAGTCCCGGCTCATCAGAGCCTTTCATGCTAAACCAG | |
| | CCCAAATGACTGATTTAGAAACTGCGTGGTCTTGTTCTTTGAGTGGATTTCTG | |
| | AGGCACACTCCAGAGCAGGCCCAGGTCTTCATTATCTCCATGCACACCCTTTG | |
| | ATTAAGCATCTGTGACCACACAGCACTGTGTGCTGTACCCAAGGAGGCAACA | |
| | G | |
| SIRT6- | GGGGGAGTCGGACTTAGAAGGTTGCCTCTGCTGCTCTCCCACTAAGAACAAT | 311 |
| CT2 | GCAGCTGCCCAGGAAACACACCCGAGCTATGAATAGGCTCAAGCACACAGG | |
| | GCGAAGCTGTCGCATTTCTGCCGTTTAGAAAGGATCTCTAGTGTGAAGTTGCT | |
| | TGGAGGCTCTGATTTTGCAAACCCAATTAAATATAGATTTCTTTGGGGTGACG | |
| | GTTGGGAAGGGTGTGGGTGGAATGTATGTCTGTGCTGCAATGCAATTTAATC | |
| | CTGAAAGTTTCAGCAAACCTATTCACACACTCCATAAACATTTCTGAGCACCT | |
| | GCTGTGTGCCAAG | |
| SIRT6- | TGCTAGGCCCCGATTTGTGGACACTGAGCTAGGCAAAAGGATATATAAAGAG | 312 |
| CT3 | ATGCAAGCTAGAGGAGGGGAAAGTTCTGGATGGGGACCTCATTGGCCTCCTC | |
| | ACCTCTGTAGACCCACGTCTTGGGTTGACCCAGGGTAGAACCCTATAAGGAT | |
| | TTGTTCAATAAACGAATGCATAGAGACTGATCAACAACTGACAAAGTGGTAT | |
| | TTTACAGATGCCGTGAAAGCAGCATACAAGCCGGAGAGCCTACTGGAAGCAA | |
| | GAGGGGAAAACCCAGCCGGGTATGGGGGCTGCGGGGAGGATGCCAGGTGGC | |
| | GGAGACTGGATTCAGGATTTGATGCTTGAACTGAACCTTCTTTTAAGAGGTGA | |
| | GTGGGCTGGGAGGTTGTGATGCCCAGAGGGTGAGGAAGGAAGTGGGG | |
| SIRT6- | GACCCTTCCATTAGATCTGAGGGCGGGGTGGGAGGGCAGAGGAGGGGAGGA | 313 |
| CT4 | CAGAGAAGTGGGAGGAAGCAGGAGAGGGGGTGGAGGGGTAGGGGCACAGT | |
| | GTCATGCCTCTCGGGCTTCCCCCACAGGGTGAATGACTGTGTGCTGCGGGTGA | |
| | ATGAGGTGGACGTGTCGGAGGTGGTACACAGCCGGGCGGTGGAGGCGCTGA | |
| | AGGAGGCAGGCCCTGTGGTGCGATTGGTGGTGCGGAGGCGACAGCCTCCACC | |
| | CGAGACCATCATGGAGGTCAACCTGCTCAAAGGGCCCAAAGGTGCGGCCCTC | |
| | CAGGTTCCTGTGCTCCAGCCAGAGC | |
| SIRT6- | GGATCCAAGGTGCCTTCACCCTGCGGCCTGCTCTATGAGGGCCTGCGTCGCAC | 314 |
| CT5 | ATCAGCTGTTGGTATCCTCACCTCGCTGAGCCGTTCCTCCGAGTGTGCTCTGT | |
| | GGCTTGCACCAGGCCTAGCTGGGCCTTGTGTCTGGTCTCATCCAGCGTCTTCT | |
| | GATTGTGGGGAATGAGGCAGAGGTCTCCCCACCTGGGCTGTCCGTGTGGCGA | |
| | AAGCCTTCCGGGGGGAGGGAGAGGAAGTGCCTCTACAAGGGCCTAGAGTCG | |
| | TCCTGTGGCACTGAGGGCTCTGGCAGCTGCACACAGGTTGATAATGTCACTG | |
| | GTGGGTGAGCTCTGTGGT | |
| SIRT6- | GCTGGATTCGATCTGAGGTCAGCTTGACTTTTCCTTCAGGATGATGCGCTGCT | 315 |
| CT6 | TCCTCTGATGAAGGATCAGGGATGCAGAATGGGACTGATGTATCTGTCCAAT | |
| | CATCCCACTCATTCTCCTCACTTTGCATGCTCTTCTCGGGGCCATCTACAGAC | |
| | AGGTGAGGGGCCCCAGGCAGACAGCTCCTTGGGACACTGAGCTCCACATTGA | |
| | AATGTTACTCAAATGAATGCGCAGAGGAGCTGTGAGTGAGAAAGTAAGCCCT | |
| | CCAGCGTGAAGAGCCCCGGAAAAGCCACCCTTGCTCTGGCACCTGTCATGCA | |
| | GCCCTCACAGCAGTACTCCCATGGGGTATGGGAGGACAGGGGCACTTCTGTT | |
| | GGTCTTTCCTTCCTCATGTTCGTCCCAGTAGGGCCTG | |
| SIRT6- | CCCAGGACAAAGTTGCTTTGGGGCGCTTACAGGTTGAATCACCCATAGCTAT | 316 |
| CT7 | GTTTTGTTTGGCTTGTACTGTGTTGTTTACATTATTTTATTAGTTGGCAATAGC | |
| | TTTAAATCAAAATTTACATTAAGGTCCAGATTTGGGGCTCCTCTTAAAAAAAT | |
| | AAATCAGCACATCTACAACAGTAGGATTTTCACGCCCAATGGCAAAATCTGT | |
| | TAAAGCTGTGTGACAGCTTCTCCTTTTAATGGAGATGACCTCTTCAGACCCTG | |
| | TACTCCAGGTGCCACAGGAACCAGCTGCCCGGTTCATCCTTGTGTGTTACCTG | |
| | CATGAGGTGGCAACCTTGTGCAAGAG | |
| SIRT6- | GCCTCGCCAAGAAACGCCCATTTATTTCCTTCCTATTTATTTATTTTGCAAAAG | 317 |
| CT8 | CCGCCTTTTGAAAGCCGGAGTGCAGTGCGGACTGGCTGAGGCCGGGGCCCAG | |
| | GCGCGCGCCTCCTTCCTGCAGGCGGCCCGGGGCATCGATCGCGCGGGGCGTA | |
| | ATGAACCCTAATAACAGCTCTATCACCGCCCGCCCGCCAATTGGCCCGGGTG | |
| | CCCTCCAAATTAGCCACAAAGAAGCCAGTCTGTCAATATTAATTCCGCCGCG | |
| | GAGATTACTTGTTGTGGGAGAACAAAGGTGTTCTGGCTTGAGCTGAACAACT | |
| | TAACTCCTTGTCTCATAAAATTTAAGCTGCTATTGATCGCCTCCTTGCATTGTG | |
| | TGAGGATTAAACACGTGCGCGTGCACATCCAGGCACACGCGCGCACACACTC | |
| | GGGGCGCCCGGCCCCGCTCAGGCAGCCGCCCCACCTCCTCGCCTACCCGGAA | |
| | T | |
| SIRT6- | CCAGCACACCCTGATAAGCAGGATTCAGATTGGGCATGGGACAGGACAAAG | 318 |
| CT9 | GCTCTGAGGAGGCATGAGTGGAGTAGTAGAGAGAACACAGGACTCTGGGTTC | |
| | TGAGCCAAGCTCTGCCATCCTGCAGCCATCTGACCCCTGGCCAGGCCTTCCCC | |
| | CAACTTCCTCAGCTGTGAAACGCGGCAGGGCTGCAGATGACGTAGGTGGGCA | |
| | GAGGCCCTCTGGTGCCTACTGCTAGACACCCTTCTACTCTGGTGGGAGACCTT | |
| | GTGCTCAAACGCTCTCAGAAGTCAGGGCAGTTGGGAGTCCAGGTCACACACA | |
| | CTCACTGGGGCCCT | |
| SIRT6- | CCAGGGCAACAGGTTTAAGACCCATTAGGAGACAATATTGTCGTCATGAATA | 319 |
| CT10 | TAAATGAGGCCTAGGCAGGTTGGGAGTAGCTAGTGTCTTGGCTCTGGCACAA | |
| | CCAGGCCCTGTTCCTCCACAGGGCTGGCCAGGGCAGAGGTGAAAGGGGCTGG | |
| | GGTGTGACCGAGTGAGCTGGGGTAGAGGTAGAAAAAGGGACACAGAACATC | |
| | CCAGGCCTAAGCTACATGGAGTATGAGAGAACAGCTGGAATGTGCTCTAGAA | |
| | GCCCTGGGAGAAGGCCTCAGTTGAGGCTGAATTCAGATATGCCTGGGACCCG | |
| | GTCTCTGTTAAGAGACCCCGGAGAGCTGGTGCAGAGCTGATGTGGGC | |
| JAK2- | GTGTGGTCAGGACAAACTGTTCCCTGAACTTAAAAGGTGAAGGACAAGACCC | 320 |
| CT1 | CATATTATTATCCTGTATTAAAAAAGGAAATATACATATATGTACACAGACA | |
| | CCCCATATCACAGACAAGAAACTTCCCATAATTCAAAGGGAGACCATTTCCT | |
| | TATTAGCAAAGGTGCGCATTACAGTATTTCATGACAGTTAAAAATTACACAC | |
| | CTACCACCTGTTTTGGTCAATCTTGCTAAAAAAGACACTGAAATAGACAATTT | |
| | TCTTCTTTAAGGTAAAGACAATGTCTAATTTAGAAAATCTTCCTCTTGAGATT | |
| | GCACAGTGAAAGGTATCAGTTAATTAAATATAAAAGCTTACCGTTTTTGTTTT | |
| | TTTTTGAGACAGAGTTTTATTCAGTCGCCCAGGCTGGAG | |
| JAK2- | GGGGCTGGGAGAAGAGAGGAATGGGAGTTATTGATAATGGGTACAGTTTCA | 321 |
| CT2 | GTTTGAAAAGATGAAAAATTCTGAAGATGGATGGTGGTAGTGATTATACAAC | |
| | AATGTGAATATACTTAATGCTGCTGAACTATACAGTTTAAAATGGTTAAATGG | |
| | TACATTTTATGTATACGTTACCATAAAAAAAAAAGTCTGGACTATAATGTTAG | |
| | AAGTAAAGATAGTAGTAATCTTATAGGAGAAAGAAGAGGATGGTGTTCAGA | |
| | AAGAGCGTGGTGAGGGTGGGGAACTTCAAGGGTGCTGGCAATATTCTATTCC | |
| | TGGGCATAGGTTATCAGTGG | |
| JAK2- | GTCCACTCTGTGTTACCCAGATCTTGTACAGGAAATGGAGTGTATTTAATATT | 322 |
| CT3 | GATGACTCTGTATGTGTCATTTAATTGTCTCTATTGATTGGATTTCATCAGAGT | |
| | GTGGGGCTTGGACAGAGCTTTGATTAGACTGTAAGGATTCTTTGCCGTTTTCT | |
| | TTTTTCCGACACCATATCAATGTACCTTCTGGTGTGATATCACTTTCACAATCA | |
| | ATATCTGAAAAAAGCTCTGCACACAGGCCTGCAGGAAAAGAGAGAAGGCAC | |
| | TGCCTCTAAGTCCCCTTATACACATAGATTTAACCTCTCCAATTGAAAAAGGT | |
| | TTATTGCATGTTTTAGAGCAGGATGGAGTGGGAAAAAAGACCTGAAGGAGTC | |
| | TCCATAG | |
| JAK2- | GCCGGTTTAGGTATGGGAACCACACAACCTCTAAAGTGAAGGAGGCTTCTCC | 323 |
| CT4 | AGCAAAACCGAACGGCATATTCAGATGCTGGGTGAGGATTCATAATATTTAG | |
| | CTATTTTGTTAATTAATATAACAGTAATTTCTTTATTCAGTCACAGAAACATC | |
| | AATGTATCTATGCTGAAGCACCATAATTTTATAAGCACAGTTATTGGGGGAA | |
| | AATGTTACCTTTTTGTCCTAAAAAGACTCTCCACGCATGTAGCTAGGGAAAGC | |
| | TAAGGTCAGTGGCAGAGTTATATGCACACCTCCACCACCAACATCACCACCA | |
| | CCACCTCCTCCTTCATCTCTCATCCAGCTCTGCCTTAGGCCCTTTTTTTTCTTTT | |
| | CTTTTCTTTTCTTTTTTTTTTCCCCAAGACAGGGTCTCACTC | |
| JAK2- | GGAACAGTGATCAGTTCTGTTACCTGACCATAATGGCTAAACAAAACAACCA | 324 |
| CT5 | AATTATAAATTAAAAGGGGTTTGAATATATAGAACATTCATTTTTCAGCTACT | |
| | AGCCAAAAAATACTATCTCTACCTGCTATCCCATGTGTTGTGTTCTTTTTAGA | |
| | CTGTCTAATTTTGAGCTGAACTGTTTCTTAGACTGACAGACAAGTCATAAATC | |
| | AAGTGATTGCTATAAATGCTTTTTATTTATATAGAGAGTGTCTCAGATTTTTA | |
| | CCTTTCTTTCATAAACTTGTCATAAATTTCTAATTCACCAATAGATGGTTGGTG | |
| | TCCATTTTTCTTGAGTCTAAGACACTTTTAAAAATTTACTTGACTTGGTCTTTT | |
| | ACGTACTTTCTTCAGAGCC | |
| JAK2- | TCCGGATTCTCCTGCTGAGGCAGGAGAATCGCTTGAAGCTGGGAGGCAGAGA | 325 |
| CT6 | TTGCAGTGAGCTAAGATCAGGCCATTGCACTCCAGCCTGGGTGACAGAGCGA | |
| | GACTCTGTCTCAAAAAAACAAAACAAAACAAAAAAAAAGAGAAAGTCAGTA | |
| | GCATGTAGATCAGGAGTGTCCAATCTTTTGGCTCCTCTGGAAGAAGAATTGTC | |
| | TTGGGCCACACATAAAATACACCATCACCTAACGATAGCTGATGAGCTTAAA | |
| | AAAAATCACAGAAAAATATCATAATGTTTTAAGAATGTTTATGAATTTTTTAC | |
| | AAATTTCTGTTGGGCCACATTCAAAGCTGTCCTGGG | |
| JAK2- | CCGACTGCTCTGCCTTCTGAATCATATGTAACCAAATCAAGTCAAACAGGTTA | 326 |
| CT7 | GAAGACAACTCACACTTCAGTGTCATCTGTACTCTTATCTTCATGAGTGTGGG | |
| | AATGTACAATCCACTTTCGCTCACTATATTAATTCATTCTGGTTCCTCATGTAC | |
| | TTAACCTATTTTTATTTTTTCAGTTTGGATACAACCCAAATCCTCTCAAGCCTT | |
| | TTAAATGCAAAAAAAAAAAATAAATTTAAAGTATATGTAGTTAAAAATACTC | |
| | ATGTCTTTACCCATTCCTTTGAGAATTTCTGTAGAGGCTTTCTCAAAATGCAG | |
| | AGAGTGGAGGCAGTCATAACATATGATGCCTGCAGATTGGGGTATCTGTCAT | |
| | TTAATCAAGAGAAGAAATAAACATTTTATGTCATTGATTTATCCATTTTAGTT | |
| | GCTATCATCTTTATAGGTTATGCCCCAATACATGGGC | |
| JAK2- | GTCCATGAATGACAGAGCACATTCACACTCATTCATTTACATATTTTCTATGC | 327 |
| CT8 | CTGTTTTTTATGCTAAATCTGTAGAGTTTAGTAATGGCAAAAGATACCGTATG | |
| | GTCCACAAGGCCTAAAATAGCTACTATCTGTACCTTACAGAAAAAAAAAAAG | |
| | AGCTGACTCTTTTTCTGACCTCTGGTCTAAGTCAAGTCTGTCCCACAAGACAC | |
| | AAGGTACAATGCTTTTTCCACATGAGGTCAGGAAGAATCTCAAAACTACAGA | |
| | GTCAGGCCTCACATTATCAATAGGACCATCCTAGCCTTCTGCAAGCTTTCAGG | |
| | CTTTAGTCAAAGCTGGCACATTTTCAGTGAATCCTTAGTCCACTGGTGGTCTG | |
| | CAAGAGCCAGAGC | |
| JAK2- | GTAAGGGTGAAAATTCATTTGATGGAAATACTTGTGTATATTTAAAGACCCA | 328 |
| CT9 | ATTGCTCCTCTGGAGCTTGTACTTTCAAGAATGATTAATCTGTGTAATAAACT | |
| | GGTTACTACAGTCATTACATATAATTTTGTGTGAATAGGCTTTTTCATTTTTAA | |
| | GAAGTTTGTCTAGCTGAGATTAGTGGTGGATTTTCTCCCACTTCTGAAATGTT | |
| | CATTTATACTGGTTGCATTTTAAGATCATGAAACAATTCCAGTTACATTGTAA | |
| | AAAGGATATCTTACGAGTAATTTTATTGAACAAGTTAGAGGCATAAGCTTAA | |
| | GAGCATTTCCATGAAACAACACATGCAGCATTCCAGGAACTTG | |

Analysis of Demultiplexed Reads Obtained from High-Throughput Sequencing of NCN and TC Repeat Target Plasmids

[0723] A unique molecular identifier (UMI) was included within each target plasmid. The UMI served to distinguish reads that contained the unedited target sequence in the starting library from edited reads produced as a result of base editing (see Table 8). Seqkit package (grep)³⁷ was used to assign fastq files containing a given UMI to its starting NCN target plasmid. Batch analysis with CRISPResso2 was performed as described above for quantification of editing frequencies.

TABLE 8
Sequences of unique molecular identifiers associ-
ated with each target plasmid for NCN context
profiling and editing window profiling. For
sequence context profiling, each target plasmid
contains a target cytosine flanked by two
nucleotides of either A, T, C or G.

| | | SEQ | | No. of TC |
|---|---|---|---|---|
| | | ID | Sequence | repeats (top or |
| Plasmid | UMI | NO: | context | bottom) |
| pBM10a | TTTGTAGTCTAGTCT | 384 | ACA | |
| pBM10b | CATTATGATCGTACG | 385 | ACT | |
| pBM10c | CTATTCAGGGATTGA | 386 | ACC | |
| pBM10d | CTGATACCGGAAGAC | 387 | ACG | |
| pBM10e | ATCTCAGTTGAAGTG | 388 | TCA | |
| pBM10f | GTGTATACGACAGAG | 389 | TCT | |
| pBM10g | ACCGTGCACCTACCA | 390 | TCC | |
| pBM10h | AACCTCCTTAGTCTA | 391 | TCG | |
| pBM10i | AGTTCAGACCAATTG | 392 | CCA | |
| pBM10j | GTAGTTTGTCCAGAA | 393 | CCT | |
| pBM10k | CTCAGATTTTATCAC | 394 | CCC | |
| pBM10l | CAGAGGACGCACGCT | 395 | CCG | |
| pBM10m | CTACCTTTATGATCC | 396 | GCA | |
| pBM10n | TCCTTGGTCCTCGAG | 397 | GCT | |
| pBM10o | AAGAGGAGACGTCAG | 398 | GCC | |
| pBM10p | TCCAGATATCTTTAA | 399 | GCG | |
| pBM22a | TTTGTAGTCTAGTCT | 384 | | 12, top |
| pBM22b | CATTATGATCGTACG | 385 | | 13, top |
| pBM22c | CTATTCAGGGATTGA | 386 | | 14, top |
| pBM22d | CTGATACCGGAAGAC | 387 | | 15, top |
| pBM22e | ATCTCAGTTGAAGTG | 388 | | 16, top |
| pBM22f | GTGTATACGACAGAG | 389 | | 17, top |
| pBM22g | ACCGTGCACCTACCA | 390 | | 18, top |
| pBM23a | AACCTCCTTAGTCTA | 391 | | 12, bottom |
| pBM23b | AGTTCAGACCAATTG | 392 | | 13, bottom |
| pBM23c | GTAGTTTGTCCAGAA | 393 | | 14, bottom |
| pBM23d | CTCAGATTTTATCAC | 394 | | 15, bottom |
| pBM23e | CAGAGGACGCACGCT | 395 | | 16, bottom |
| pBM23f | CTACCTTTATGATCC | 396 | | 17, bottom |
| pBM23g | TCCTTGGTCCTCGAG | 397 | | 18, bottom |

### Bulk ATAC-Seq for Whole Mitochondrial Genome Sequencing

[0724] ATAC-seq was performed as previously described¹⁷. In brief, 5,000-10,000 cells were trypsinzed, washed with PBS, pelleted by centrifugation and lysed in 50 μL of lysis buffer (0.1% Igepal CA-360 (v/v %), 10 mM Tris-HCl, 10 mM NaCl and 3 mM MgCl₂ in nuclease-free water). Lysates were incubated on ice for 3 minutes, pelleted at 500 rcf for 10 minutes at 4° C. and tagmented with 2.5 μL of Tn5 transposase (Illumina #15027865) in a total volume of 10 μL containing 1×TD buffer (Illumina #15027866), 0.1% NP-40 (Sigma), and 0.3×PBS. Samples were incubated at 37° C. for 30 minutes on a thermomixer at 300 rpm. DNA was purified using the MinElute PCR Kit (Qiagen) and eluted in 10 μL elution buffer. All 10 μL of the eluate was amplified using indexed primers (1.25 μM each, sequences available as previously reported¹⁷) and NEBNext High-Fidelity 2×PCR Master Mix (New England Biolabs) in a total volume of 50 μL using the following protocol 72° C. for 5 min, 98° C. for 30 s, then 5 cycles of [98° C. for 10 s, 63° C. for 30 s, and 72° C. for 60 s], followed by a final 72° C. extension for 1 min. After the initial 5 cycles of pre-amplification, 5 μL of partially amplified library was used as input DNA in a total volume of 15 μL for quantitative PCR using SYBR Green to determine the number of additional cycles needed to reach ⅓ of the maximum fluorescence intensity. Typically, 3-8 cycles were conducted on the remaining 45 μL of partially amplified library. The final library was purified using a MinElute PCR kit (Qiagen) and quantified using a Qubit dsDNA HS Assay kit (Invitrogen) and a High Sensitivity DNA chip run on a Bioanalyzer 2100 system (Agilent). All libraries were sequenced using Nextseq High Output Cartridge kits on an Illumina Nextseq 500 sequencer. Libraries were sequenced using paired-end 2×75 cycles and demultiplexed using the bcl2fastq program. A sequencing depth of ˜3,000-8,000× was obtained per sample.

### Genome Sequencing and SNP Identification in Mitochondria

[0725] Analysis was performed as previously described¹⁷. Genome mapping was performed with BWA (v0.7.17) using NC_012920 genome as a reference. Duplicates were marked using Picard tools (v2.20.7). Pileup data from alignments were generated with SAMtools (v1.9) and variant calling was performed with VarScan2 (v2.4.3). Variants that were present at a frequency greater than 0.1% and a p-value less than 0.05 (Fisher's Exact Test) were called as high-confidence SNPs independently in each biological replicate. Only reads with Q>30 at a given position were taken into account when calling SNPs at that particular position. For FIGS. 33A-33F, all SNPs that were called in untreated samples were excluded from the analyses of treated samples. Each SNP was called in treated samples if it appeared in at least one biological replicate, and the average frequency was calculated by taking the average of all replicate(s) in which the SNP was present.

### Calculation of Average Off-Target C⋅G-to-T⋅a Editing Frequency

[0726] Analysis was performed as previously described^{17,38}. To calculate the mitochondrial genome-wide average off-target editing frequency for each DdCBE in FIG. 21I, REDItools was used (v1.2.1)³⁹. All nucleobases except cytosines and guanines were removed and the number of reads covering each C⋅G base pair with a PHRED quality score greater than 30 (Q>30) was calculated. The on-target C⋅G base pairs (depending on the DdCBE used in each treatment) were excluded in order to only consider off-target effects. C⋅G-to-T⋅A SNVs present at high frequencies (>50%) in both treated and untreated samples (that therefore did not arise from DdCBE treatment) were also excluded. The average off-target editing frequency was then calculated independently for each biological replicate of each treatment condition as: (number of reads in which a given C⋅G base pair was called as a T⋅A base pair, summed over all non-target C⋅G base pairs)+(total number of reads that covered all non-target C⋅G base pair).

### Oxygen Consumption Rate Analyses by Seahorse XF Analyzer

[0727] Seahorse plate was coated with 0.01% (w/v) poly-L-lysine (Sigma). 1.6×10⁴ cells were seeded on the coated Seahorse plate 16 hours prior to the analysis in the Seahorse XFe96 Analyzer (Agilent). Analysis was performed in the Seahorse XF DMEM Medium pH 7.4 (Agilent) supplemented with 10 mM glucose (Agilent), 2 mM L-glutamine (Gibco) and 1 mM sodium pyruvate (Gibco). Mito stress protocol was applied with the use of 1.5 mM oligomycin, 1 mM FCCP, and 1 mM piericidin+1 mM antimycin.

### Sequences

### TALE Sequences Used in DdCBEs

[0728] All right-side halves of DdCBEs have the general architecture of (from N- to C-terminus): COX8A MTS-3×FLAG-mitoTALE-2aa linker-DddA^{tox} half-4aa linker-1×-UGI-ATP5B 3′UTR.

[0729] All left-side halves of DdCBEs have the general architecture of (from N- to C-terminus): SOD2 MTS-3×HA-mitoTALE-2aa linker-DddAₜₒₓ half-4aa linker-1×-UGI-SOD2 3′UTR.

[0730] TALE sequences for SIRT6-DdCBE and JAK2-DdCBE are from Addgene plasmids #TAL2406, TAL2407, TAL2454 and TAL2455.

[0731] mitoTALE domains are annotated as: bold for N-terminal domain, underlined for RVD and bolded italics for C-terminal domain.

ND1-DdCBE Right mitoTALE repeat
(SEQ ID NO: 147)
DIADLRTLGYSQQQQEKIKPKVRSTVAQHHEALVGHGFTHAHIVALSQHPAALGTVAVKYQDM
IAALPEATHEAIVGVGKQWSGARALEALLTVAGELRGPPLQLDTGQLLKIAKRGGVTAVEAVH
AWRNALTGAPLNLTPEQVVAIASNNGGKQALETVQALLPVLCQAHGLTPQQVVAIASNIGGKQALE
TVQRLLPVLCQAHGLTPQQVVAIASNNGGKQALETVQRLLPVLCQAHGLTPEQVVAIASNGGGKQAL
ETVQALLPVLCQAHGLTPEQVVAIASNGGGKQALETVQALLPVLCQAHGLTPEQVVAIASNGGGKQA
LETVQALLPVLCQAHGLTPEQVVAIASNNGGKQALETVQRLLPVLCQAHGLTPEQVVAIASNIGGKQ
ALETVQALLPVLCQAHGLTPEQVVAIASNGGGKQALETVQRLLPVLCQAHGLTPEQVVAIASNNGGK
QALETVQALLPVLCQAHGLTPEQVVAIASHDGGKQALETVQALLPVLCQAHGLTPEQVVAIASNGGG
KQALETVQALLPVLCQAHGLTPEQVVAIASHDGGKQALETVQRLLPVLCQAHGLTPQQVVAIASNIG
GKQALETVQRLLPVLCQAHGLTPEQVVAIASHDGGKQALETVQALLPVLCQAHGLTPQQVVAIASHD
GGKQALETVQRLLPVLCQAHGLTPQQVVAIASHDGGKQALETVQRLLPVLCQAHGLTPQQVVAIASN
GGGRPALESIVAQLSRPDPALAALTNDHLVALACLGGRPALDAVKKGLG
ND1-DdCBE Left mitoTALE repeat
(SEQ ID NO: 149)
DIADLRTLGYSQQQQEKIKPKVRSTVAQHHEALVGHGFTHAHIVALSQHPAALGTVAVKYQDM
IAALPEATHEAIVGVGKQWSGARALEALLTVAGELRGPPLQLDTGQLLKIAKRGGVTAVEAVH
AWRNALTGAPLNLTPEQVVAIASHDGGKQALETVQALLPVLCQAHGLTPQQVVAIASNGGGKQALE
TVQRLLPVLCQAHGLTPQQVVAIASNIGGKQALETVQRLLPVLCQAHGLTPEQVVAIASNNGGKQAL
ETVQALLPVLCQAHGLTPEQVVAIASHDGGKQALETVQALLPVLCQAHGLTPEQVVAIASHDGGKQA
LETVQALLPVLCQAHGLTPEQVVAIASNGGGKQALETVQRLLPVLCQAHGLTPEQVVAIASNIGGKQ
ALETVQALLPVLCQAHGLTPEQVVAIASNNGGKQALETVQRLLPVLCQAHGLTPEQVVAIASHDGGK
QALETVQALLPVLCQAHGLTPEQVVAIASHDGGKQALETVQALLPVLCQAHGLTPEQVVAIASNNGG
KQALETVQALLPVLCQAHGLTPEQVVAIASNGGGKQALETVQRLLPVLCQAHGLTPQQVVAIASNGG
GKQALETVQRLLPVLCQAHGLTPQQVVAIASNGGGRPALESIVAQLSRPDPALAALTNDHLVALACLG
GRPALDAVKKGLG
ND1.2-DdCBE Left mitoTALE repeat
(SEQ ID NO: 186)
DIADLRTLGYSQQQQEKIKPKVRSTVAQHHEALVGHGFTHAHIVALSQHPAALGTVAVKYQDM
IAALPEATHEAIVGVGKQWSGARALEALLTVAGELRGPPLQLDTGQLLKIAKRGGVTAVEAVH
AWRNALTGAPLNLTPEQVVAIASNIGGKQALETVQALLPVLCQAHGLTPQQVVAIASNGGGKQALE
TVQRLLPVLCQAHGLTPQQVVAIASNIGGKQALETVQRLLPVLCQAHGLTPEQVVAIASNGGGKQAL
ETVQALLPVLCQAHGLTPEQVVAIASNIGGKQALETVQALLPVLCQAHGLTPEQVVAIASNNGGKQA
LETVQALLPVLCQAHGLTPEQVVAIASHDGGKQALETVQRLLPVLCQAHGLTPQQVVAIASHDGGKQ
ALETVQALLPVLCQAHGLTPEQVVAIASNGGGKQALETVQRLLPVLCQAHGLTPEQVVAIASNIGGK
QALETVQRLLPVLCQAHGLTPEQVVAIASNNGGKQALETVQALLPVLCQAHGLTPQQVVAIASNIGG
RPALESIVAQLSRPDPALAALTNDHLVALACLGGRPALDAVKKGLG
ND1.2-DdCBE Left mitoTALE repeat
(SEQ ID NO: 187)
DIADLRTLGYSQQQQEKIKPKVRSTVAQHHEALVGHGFTHAHIVALSQHPAALGTVAVKYQDM
IAALPEATHEAIVGVGKQWSGARALEALLTVAGELRGPPLQLDTGQLLKIAKRGGVTAVEAVH
AWRNALTGAPLNLTPEQVVAIASHDGGKQALETVQALLPVLCQAHGLTPQQVVAIASHDGGKQALE
TVQRLLPVLCQAHGLTPQQVVAIASNGGGKQALETVQRLLPVLCQAHGLTPEQVVAIASNIGGKQAL
ETVQALLPVLCQAHGLTPEQVVAIASNIGGKQALETVQALLPVLCQAHGLTPEQVVAIASNGGGKQA
LETVQALLPVLCQAHGLTPEQVVAIASNNGGKQALETVQRLLPVLCQAHGLTPQQVVAIASHDGGKQ
ALETVQALLPVLCQAHGLTPEQVVAIASNGGGKQALETVQRLLPVLCQAHGLTPQQVVAIASNGGGR
PALESIVAQLSRPDPALAALTNDHLVALACLGGRPALDAVKKGLG
ND2-DdCBE Right mitoTALE repeat
(SEQ ID NO: 151)
DIADLRTLGYSQQQQEKIKPKVRSTVAQHHEALVGHGFTHAHIVALSQHPAALGTVAVKYQDM
IAALPEATHEAIVGVGKQWSGARALEALLTVAGELRGPPLQLDTGQLLKIAKRGGVTAVEAVH
AWRNALTGAPLNLTPEQVVAIASNIGGKQALETVQALLPVLCQAHGLTPQQVVAIASNNGGKQALE
TVQRLLPVLCQAHGLTPQQVVAIASNIGGKQALETVQRLLPVLCQAHGLTPEQVVAIASNIGGKQALE
TVQALLPVLCQAHGLTPEQVVAIASHDGGKQALETVQALLPVLCQAHGLTPEQVVAIASNGGGKQAL
ETVQALLPVLCQAHGLTPEQVVAIASNNGGKQALETVQRLLPVLCQAHGLTPEQVVAIASHDGGKQA
LETVQALLPVLCQAHGLTPEQVVAIASNGGGKQALETVQRLLPVLCQAHGLTPEQVVAIASNIGGKQ
ALETVQALLPVLCQAHGLTPEQVVAIASNGGGKQALETVQALLPVLCQAHGLTPEQVVAIASNGGGK
QALETVQALLPVLCQAHGLTPEQVVAIASNIGGKQALETVQRLLPVLCQAHGLTPQQVVAIASNGGG
KQALETVQRLLPVLCQAHGLTPQQVVAIASNGGGRPALESIVAQLSRPDPALAALTNDHLVALACLGG
RPALDAVKKGLG
ND2-DdCBE Left mitoTALE repeat
(SEQ ID NO: 171)
DIADLRTLGYSQQQQEKIKPKVRSTVAQHHEALVGHGFTHAHIVALSQHPAALGTVAVKYQDM
IAALPEATHEAIVGVGKQWSGARALEALLTVAGELRGPPLQLDTGQLLKIAKRGGVTAVEAVH
AWRNALTGAPLNLTPEQVVAIASHDGGKQALETVQALLPVLCQAHGLTPQQVVAIASNGGGKQALE
TVQRLLPVLCQAHGLTPQQVVAIASNGGGKQALETVQRLLPVLCQAHGLTPEQVVAIASNIGGKQAL
ETVQALLPVLCQAHGLTPEQVVAIASNNGGKQALETVQALLPVLCQAHGLTPEQVVAIASHDGGKQA
LETVQALLPVLCQAHGLTPEQVVAIASNIGGKQALETVQRLLPVLCQAHGLTPEQVVAIASNGGGKQ
ALETVQALLPVLCQAHGLTPEQVVAIASNIGGKQALETVQRLLPVLCQAHGLTPEQVVAIASHDGGK
QALETVQALLPVLCQAHGLTPEQVVAIASNGGGKQALETVQALLPVLCQAHGLTPEQVVAIASHDGG
KQALETVQALLPVLCQAHGLTPEQVVAIASHDGGKQALETVQRLLPVLCQAHGLTPQQVVAIASNGG
GKQALETVQRLLPVLCQAHGLTPEQVVAIASHDGGKQALETVQALLPVLCQAHGLTPEQVVAIASNI
GGKQALETVQALLPVLCQAHGLTPEQVVAIASNIGGKQALETVQALLPVLCQAHGLTPQQVVAIASN
GGGRPALESIVAQLSRPDPALAALTNDHLVALACLGGRPALDAVKKGLG
ND4-DdCBE Right mitoTALE repeat
(SEQ ID NO: 154)
DIADLRTLGYSQQQQEKIKPKVRSTVAQHHEALVGHGFTHAHIVALSQHPAALGTVAVKYQDM
IAALPEATHEAIVGVGKQWSGARALEALLTVAGELRGPPLQLDTGQLLKIAKRGGVTAVEAVH
AWRNALTGAPLNLTPEQVVAIASHDGGKQALETVQALLPVLCQAHGLTPQQVVAIASHDGGKQALE
TVQRLLPVLCQAHGLTPQQVVAIASNGGGKQALETVQRLLPVLCQAHGLTPEQVVAIASNNGGKQAL
ETVQALLPVLCQAHGLTPEQVVAIASNGGGKQALETVQALLPVLCQAHGLTPEQVVAIASNIGGKQA
LETVQALLPVLCQAHGLTPEQVVAIASNIGGKQALETVQRLLPVLCQAHGLTPEQVVAIASNNGGKQ
ALETVQALLPVLCQAHGLTPEQVVAIASNGGGKQALETVQRLLPVLCQAHGLTPEQVVAIASNIGGK
QALETVQRLLPVLCQAHGLTPEQVVAIASNNGGKQALETVQALLPVLCQAHGLTPEQVVAIASNNGG
KQALETVQALLPVLCQAHGLTPEQVVAIASNIGGKQALETVQALLPVLCQAHGLTPEQVVAIASNNG
GKQALETVQRLLPVLCQAHGLTPQQVVAIASNIGGKQALETVQRLLPVLCQAHGLTPQQVVAIASNN
GGKQALETVQRLLPVLCQAHGLTPQQVVAIASNGGGRPALESIVAQLSRPDPALAALTNDHLVALACL
GGRPALDAVKKGLG
ND4-DdCBE Left mitoTALE repeat
(SEQ ID NO: 156)
DIADLRTLGYSQQQQEKIKPKVRSTVAQHHEALVGHGFTHAHIVALSQHPAALGTVAVKYQDM
IAALPEATHEAIVGVGKQWSGARALEALLTVAGELRGPPLQLDTGQLLKIAKRGGVTAVEAVH
AWRNALTGAPLNLTPEQVVAIASNNGGKQALETVQALLPVLCQAHGLTPQQVVAIASHDGGKQALE
TVQRLLPVLCQAHGLTPQQVVAIASNGGGKQALETVQRLLPVLCQAHGLTPEQVVAIASNIGGKQAL
ETVQALLPVLCQAHGLTPEQVVAIASNNGGKQALETVQALLPVLCQAHGLTPEQVVAIASNGGGKQA
LETVQALLPVLCQAHGLTPEQVVAIASNIGGKQALETVQRLLPVLCQAHGLTPEQVVAIASNIGGKQA
LETVQALLPVLCQAHGLTPEQVVAIASHDGGKQALETVQRLLPVLCQAHGLTPEQVVAIASHDGGKQ
ALETVQALLPVLCQAHGLTPEQVVAIASNIGGKQALETVQALLPVLCQAHGLTPEQVVAIASHDGGK
QALETVQALLPVLCQAHGLTPEQVVAIASNNGGKQALETVQRLLPVLCQAHGLTPQQVVAIASNGGG
KQALETVQRLLPVLCQAHGLTPEQVVAIASNGGGKQALETVQALLPVLCQAHGLTPEQVVAIASHDG
GKQALETVQALLPVLCQAHGLTPQQVVAIASNGGGRPALESIVAQLSRPDPALAALTNDHLVALACLG
GRPALDAVKKGLG
ND4.2-DdCBE Right mitoTALE repeat
(SEQ ID NO: 188)
DIADLRTLGYSQQQQEKIKPKVRSTVAQHHEALVGHGFTHAHIVALSQHPAALGTVAVKYQDM
IAALPEATHEAIVGVGKQWSGARALEALLTVAGELRGPPLQLDTGQLLKIAKRGGVTAVEAVH
AWRNALTGAPLNLTPEQVVAIASNNGGKQALETVQALLPVLCQAHGLTPQQVVAIASNNGGKQALE
TVQRLLPVLCQAHGLTPQQVVAIASNNGGKQALETVQRLLPVLCQAHGLTPEQVVAIASHDGGKQAL
ETVQALLPVLCQAHGLTPEQVVAIASNNGGKQALETVQALLPVLCQAHGLTPEQVVAIASNIGGKQA
LETVQALLPVLCQAHGLTPEQVVAIASNGGGKQALETVQRLLPVLCQAHGLTPEQVVAIASNGGGKQ
ALETVQALLPVLCQAHGLTPQQVVAIASNIGGKQALETVQRLLPVLCQAHGLTPEQVVAIASNGGGK
QALETVQRLLPVLCQAHGLTPQQVVAIASNNGGKQALETVQRLLPVLCQAHGLTPQQVVAIASNIGG
RPALESIVAQLSRPDPALAALTNDHLVALACLGGRPALDAVKKGLG
ND4.2-DdCBE Left mitoTALE repeat
(SEQ ID NO: 189)
DIADLRTLGYSQQQQEKIKPKVRSTVAQHHEALVGHGFTHAHIVALSQHPAALGTVAVKYQDM
IAALPEATHEAIVGVGKQWSGARALEALLTVAGELRGPPLQLDTGQLLKIAKRGGVTAVEAVH
AWRNALTGAPLNLTPEQVVAIASNNGGKQALETVQALLPVLCQAHGLTPQQVVAIASNIGGKQALE
TVQRLLPVLCQAHGLTPQQVVAIASNIGGKQALETVQRLLPVLCQAHGLTPEQVVAIASNNGGKQAL
ETVQALLPVLCQAHGLTPEQVVAIASHDGGKQALETVQALLPVLCQAHGLTPEQVVAIASNGGGKQA
LETVQALLPVLCQAHGLTPEQVVAIASNGGGKQALETVQRLLPVLCQAHGLTPEQVVAIASHDGGKQ
ALETVQALLPVLCQAHGLTPQQVVAIASNIGGKQALETVQRLLPVLCQAHGLTPQQVVAIASHDGGK
QALETVQRLLPVLCQAHGLTPQQVVAIASHDGGRPALESIVAQLSRPDPALAALTNDHLVALACLGGR
PALDAVKKGLG
ND4.3-DdCBE Right mitoTALE repeat
(SEQ ID NO: 190)
DIADLRTLGYSQQQQEKIKPKVRSTVAQHHEALVGHGFTHAHIVALSQHPAALGTVAVKYQDM
IAALPEATHEAIVGVGKQWSGARALEALLTVAGELRGPPLQLDTGQLLKIAKRGGVTAVEAVH
AWRNALTGAPLNLTPEQVVAIASNNGGKQALETVQALLPVLCQAHGLTPQQVVAIASNNGGKQALE
TVQRLLPVLCQAHGLTPQQVVAIASHDGGKQALETVQRLLPVLCQAHGLTPEQVVAIASNGGGKQAL
ETVQALLPVLCQAHGLTPEQVVAIASNNGGKQALETVQALLPVLCQAHGLTPEQVVAIASNGGGKQA
LETVQALLPVLCQAHGLTPEQVVAIASNGGGKQALETVQRLLPVLCQAHGLTPEQVVAIASNIGGKQ
ALETVQALLPVLCQAHGLTPEQVVAIASHDGGKQALETVQRLLPVLCQAHGLTPQQVVAIASNGGGR
PALESIVAQLSRPDPALAALTNDHLVALACLGGRPALDAVKKGLG
ND4.3-DdCBE Left mitoTALE repeat
(SEQ ID NO: 191)
DIADLRTLGYSQQQQEKIKPKVRSTVAQHHEALVGHGFTHAHIVALSQHPAALGTVAVKYQDM
IAALPEATHEAIVGVGKQWSGARALEALLTVAGELRGPPLQLDTGQLLKIAKRGGVTAVEAVH
AWRNALTGAPLNLTPEQVVAIASHDGGKQALETVQALLPVLCQAHGLTPQQVVAIASNGGGKQALE
TVQRLLPVLCQAHGLTPQQVVAIASNGGGKQALETVQRLLPVLCQAHGLTPEQVVAIASHDGGKQAL
ETVQALLPVLCQAHGLTPEQVVAIASNIGGKQALETVQALLPVLCQAHGLTPEQVVAIASNIGGKQAL
ETVQALLPVLCQAHGLTPEQVVAIASNGGGKQALETVQRLLPVLCQAHGLTPEQVVAIASHDGGKQA
LETVQALLPVLCQAHGLTPQQVVAIASNIGGKQALETVQRLLPVLCQAHGLTPQQVVAIASNNGGKQ
ALETVQRLLPVLCQAHGLTPEQVVAIASHDGGKQALETVQRLLPVLCQAHGLTPQQVVAIASHDGGR
PALESIVAQLSRPDPALAALTNDHLVALACLGGRPALDAVKKGLG
ND5.2-DdCBE Right mitoTALE repeat (Note: Terminal NG RVD recognizes a mismatched
T instead of a G in the reference genome)
(SEQ ID NO: 161)
DIADLRTLGYSQQQQEKIKPKVRSTVAQHHEALVGHGFTHAHIVALSQHPAALGTVAVKYQDM
IAALPEATHEAIVGVGKQWSGARALEALLTVAGELRGPPLQLDTGQLLKIAKRGGVTAVEAVH
AWRNALTGAPLNLTPQQVVAIASNNGGKQALETVQRLLPVLCQAHGLTPEQVVAIASHDGGKQALE
TVQRLLPVLCQAHGLTPQQVVAIASNGGGKQALETVQRLLPVLCQAHGLTPEQVVAIASNIGGKQAL
ETVQALLPVLCQAHGLTPQQVVAIASNNGGKQALETVQRLLPVLCQAHGLTPQQVVAIASNNGGKQ
ALETVQRLLPVLCQAHGLTPEQVVAIASHDGGKQALETVQRLLPVLCQAHGLTPQQVVAIASNGGGK
QALETVQRLLPVLCQAHGLTPQQVVAIASNNGGKQALETVQRLLPVLCQAHGLTPEQVVAIASHDGG
KQALETVQRLLPVLCQAHGLTPEQVVAIASHDGGKQALETVQRLLPVLCQAHGLTPEQVVAIASNIG
GKQALETVQALLPVLCQAHGLTPEQVVAIASNIGGKQALETVQALLPVLCQAHGLTPQQVVAIASNG
GGKQALETVQRLLPVLCQAHGLTPQQVVAIASNNGGKQALETVQRLLPVLCQAHGLTPQQVVAIASN
GGGRPALESIVAQLSRPDPALAALTNDHLVALACLGGRPALDAVKKGLG
ND5.2-DdCBE Right mitoTALE repeat (non-mismatched)
(SEQ ID NO: 192)
DIADLRTLGYSQQQQEKIKPKVRSTVAQHHEALVGHGFTHAHIVALSQHPAALGTVAVKYQDM
IAALPEATHEAIVGVGKQWSGARALEALLTVAGELRGPPLQLDTGQLLKIAKRGGVTAVEAVH
AWRNALTGAPLNLTPQQVVAIASNNGGKQALETVQRLLPVLCQAHGLTPEQVVAIASHDGGKQALE
TVQRLLPVLCQAHGLTPQQVVAIASNGGGKQALETVQRLLPVLCQAHGLTPEQVVAIASNIGGKQAL
ETVQALLPVLCQAHGLTPQQVVAIASNNGGKQALETVQRLLPVLCQAHGLTPQQVVAIASNNGGKQ
ALETVQRLLPVLCQAHGLTPEQVVAIASHDGGKQALETVQRLLPVLCQAHGLTPQQVVAIASNGGGK
QALETVQRLLPVLCQAHGLTPQQVVAIASNNGGKQALETVQRLLPVLCQAHGLTPEQVVAIASHDGG
KQALETVQRLLPVLCQAHGLTPEQVVAIASHDGGKQALETVQRLLPVLCQAHGLTPEQVVAIASNIG
GKQALETVQALLPVLCQAHGLTPEQVVAIASNIGGKQALETVQALLPVLCQAHGLTPQQVVAIASNG
GGKQALETVQRLLPVLCQAHGLTPQQVVAIASNNGGKQALETVQRLLPVLCQAHGLTPQQVVAIASN
NGGRPALESIVAQLSRPDPALAALTNDHLVALACLGGRPALDAVKKGLG
ND5.2-DdCBE Left mitoTALE repeat
(SEQ ID NO: 173)
DIADLRTLGYSQQQQEKIKPKVRSTVAQHHEALVGHGFTHAHIVALSQHPAALGTVAVKYQDM
IAALPEATHEAIVGVGKQWSGARALEALLTVAGELRGPPLQLDTGQLLKIAKRGGVTAVEAVH
AWRNALTGAPLNLTPEQVVAIASHDGGKQALETVQALLPVLCQAHGLTPQQVVAIASNIGGKQALE
TVQRLLPVLCQAHGLTPQQVVAIASNIGGKQALETVQRLLPVLCQAHGLTPEQVVAIASNIGGKQALE
TVQALLPVLCQAHGLTPEQVVAIASNIGGKQALETVQALLPVLCQAHGLTPEQVVAIASHDGGKQAL
ETVQALLPVLCQAHGLTPEQVVAIASHDGGKQALETVQRLLPVLCQAHGLTPEQVVAIASNIGGKQA
LETVQALLPVLCQAHGLTPEQVVAIASNGGGKQALETVQRLLPVLCQAHGLTPEQVVAIASNIGGKQ
ALETVQALLPVLCQAHGLTPEQVVAIASHDGGKQALETVQALLPVLCQAHGLTPEQVVAIASHDGGK
QALETVQALLPVLCQAHGLTPEQVVAIASNGGGKQALETVQRLLPVLCQAHGLTPQQVVAIASHDGG
KQALETVQRLLPVLCQAHGLTPQQVVAIASNGGGRPALESIVAQLSRPDPALAALTNDHLVALACLGG
RPALDAVKKGLG
ND5.4-DdCBE Right mitoTALE repeat
(SEQ ID NO: 193)
DIADLRTLGYSQQQQEKIKPKVRSTVAQHHEALVGHGFTHAHIVALSQHPAALGTVAVKYQDM
IAALPEATHEAIVGVGKQWSGARALEALLTVAGELRGPPLQLDTGQLLKIAKRGGVTAVEAVH
AWRNALTGAPLNLTPEQVVAIASNNGGKQALETVQALLPVLCQAHGLTPQQVVAIASHDGGKQALE
TVQRLLPVLCQAHGLTPQQVVAIASNGGGKQALETVQRLLPVLCQAHGLTPEQVVAIASNIGGKQAL
ETVQALLPVLCQAHGLTPEQVVAIASNNGGKQALETVQALLPVLCQAHGLTPEQVVAIASNNGGKQA
LETVQALLPVLCQAHGLTPEQVVAIASNGGGKQALETVQRLLPVLCQAHGLTPEQVVAIASNNGGKQ
ALETVQALLPVLCQAHGLTPQQVVAIASNGGGRPALESIVAQLSRPDPALAALTNDHLVALACLGGRP
ALDAVKKGLG
ND5.4-DdCBE Left mitoTALE repeat
(SEQ ID NO: 194)
DIADLRTLGYSQQQQEKIKPKVRSTVAQHHEALVGHGFTHAHIVALSQHPAALGTVAVKYQDM
IAALPEATHEAIVGVGKQWSGARALEALLTVAGELRGPPLQLDTGQLLKIAKRGGVTAVEAVH
AWRNALTGAPLNLTPEQVVAIASHDGGKQALETVQALLPVLCQAHGLTPQQVVAIASNIGGKQALE
TVQRLLPVLCQAHGLTPQQVVAIASNGGGKQALETVQRLLPVLCQAHGLTPEQVVAIASNIGGKQAL
ETVQALLPVLCQAHGLTPEQVVAIASNIGGKQALETVQALLPVLCQAHGLTPEQVVAIASNGGGKQA
LETVQALLPVLCQAHGLTPEQVVAIASNIGGKQALETVQRLLPVLCQAHGLTPEQVVAIASNNGGKQ
ALETVQALLPVLCQAHGLTPEQVVAIASNGGGKQALETVQRLLPVLCQAHGLTPEQVVAIASNGGGK
QALETVQALLPVLCQAHGLTPEQVVAIASNIGGKQALETVQALLPVLCQAHGLTPEQVVAIASHDGG
KQALETVQRLLPVLCQAHGLTPQQVVAIASNIGGKQALETVQRLLPVLCQAHGLTPQQVVAIASNIGG
RPALESIVAQLSRPDPALAALTNDHLVALACLGGRPALDAVKKGLG
ATP8-DdCBE Right mitoTALE repeat
(SEQ ID NO: 12)
DIADLRTLGYSQQQQEKIKPKVRSTVAQHHEALVGHGFTHAHIVALSQHPAALGTVAVKYQDM
IAALPEATHEAIVGVGKQWSGARALEALLTVAGELRGPPLQLDTGQLLKIAKRGGVTAVEAVH
AWRNALTGAPLNLTPQQVVAIASNIGGKQALETVQRLLPVLCQAHGLTPEQVVAIASNGGGKQALE
TVQRLLPVLCQAHGLTPQQVVAIASNNGGKQALETVQRLLPVLCQAHGLTPEQVVAIASNNGGKQAL
ETVQALLPVLCQAHGLTPQQVVAIASNNGGKQALETVQRLLPVLCQAHGLTPQQVVAIASHDGGKQ
ALETVQRLLPVLCQAHGLTPEQVVAIASNGGGKQALETVQRLLPVLCQAHGLTPQQVVAIASNGGGK
QALETVQRLLPVLCQAHGLTPQQVVAIASNGGGKQALETVQRLLPVLCQAHGLTPEQVVAIASNNGG
KQALETVQRLLPVLCQAHGLTPEQVVAIASNNGGKQALETVQRLLPVLCQAHGLTPQQVVAIASNGG
GRPALESIVAQLSRPDPALAALTNDHLVALACLGGRPALDAVKKGLG
ATP8-DdCBE Left mitoTALE repeat (Note: Terminal NG RVD recognizes a mismatched T
instead of a C in the reference genome)
(SEQ ID NO: 170)
DIADLRTLGYSQQQQEKIKPKVRSTVAQHHEALVGHGFTHAHIVALSQHPAALGTVAVKYQDM
IAALPEATHEAIVGVGKQWSGARALEALLTVAGELRGPPLQLDTGQLLKIAKRGGVTAVEAVH
AWRNALTGAPLNLTPEQVVAIASNIGGKQALETVQALLPVLCQAHGLTPQQVVAIASNGGGKQALE
TVQRLLPVLCQAHGLTPQQVVAIASNGGGKQALETVQRLLPVLCQAHGLTPEQVVAIASNIGGKQAL
ETVQALLPVLCQAHGLTPEQVVAIASNIGGKQALETVQALLPVLCQAHGLTPEQVVAIASNIGGKQAL
ETVQALLPVLCQAHGLTPEQVVAIASHDGGKQALETVQRLLPVLCQAHGLTPEQVVAIASNIGGKQA
LETVQALLPVLCQAHGLTPEQVVAIASHDGGKQALETVQRLLPVLCQAHGLTPEQVVAIASNIGGKQ
ALETVQALLPVLCQAHGLTPEQVVAIASNIGGKQALETVQALLPVLCQAHGLTPEQVVAIASNIGGKQ
ALETVQALLPVLCQAHGLTPEQVVAIASHDGGKQALETVQRLLPVLCQAHGLTPQQVVAIASNGGGK
QALETVQRLLPVLCQAHGLTPEQVVAIASNIGGKQALETVQALLPVLCQAHGLTPQQVVAIASNGGG
RPALESIVAQLSRPDPALAALTNDHLVALACLGGRPALDAVKKGLG
ATP8-DdCBE Left mitoTALE repeat (non-mismatched)
(SEQ ID NO: 195)
DIADLRTLGYSQQQQEKIKPKVRSTVAQHHEALVGHGFTHAHIVALSQHPAALGTVAVKYQDM
IAALPEATHEAIVGVGKQWSGARALEALLTVAGELRGPPLQLDTGQLLKIAKRGGVTAVEAVH
AWRNALTGAPLNLTPEQVVAIASNIGGKQALETVQALLPVLCQAHGLTPQQVVAIASNGGGKQALE
TVQRLLPVLCQAHGLTPQQVVAIASNGGGKQALETVQRLLPVLCQAHGLTPEQVVAIASNIGGKQAL
ETVQALLPVLCQAHGLTPEQVVAIASNIGGKQALETVQALLPVLCQAHGLTPEQVVAIASNIGGKQAL
ETVQALLPVLCQAHGLTPEQVVAIASHDGGKQALETVQRLLPVLCQAHGLTPEQVVAIASNIGGKQA
LETVQALLPVLCQAHGLTPEQVVAIASHDGGKQALETVQRLLPVLCQAHGLTPEQVVAIASNIGGKQ
ALETVQALLPVLCQAHGLTPEQVVAIASNIGGKQALETVQALLPVLCQAHGLTPEQVVAIASNIGGKQ
ALETVQALLPVLCQAHGLTPEQVVAIASHDGGKQALETVQRLLPVLCQAHGLTPQQVVAIASNGGGK
QALETVQRLLPVLCQAHGLTPEQVVAIASNIGGKQALETVQALLPVLCQAHGLTPQQVVAIASHDGG
RPALESIVAQLSRPDPALAALTNDHLVALACLGGRPALDAVKKGLG

### Sequences of Full-Length DddA Variants

DddA1 (T1380I)
(SEQ ID NO: 27)
GSYALGPYQISAPQLPAYNGQTVGTFYYVNDAGGLESKVFSSGGPTPYPNYANAGHVEGQSALFMRD
NGISEGLVFHNNPEGTCGFCVNMIETLLPENAKMTVVPPEGAIPVKRGATGETKVFTGNSNSPKSPTK
GGC
DddA2 (T1314A + T1380I)
(SEQ ID NO: 28)
GSYALGPYQISAPQLPAYNGQTVGAFYYVNDAGGLESKVFSSGGPTPYPNYANAGHVEGQSALFMR
DNGISEGLVFHNNPEGTCGFCVNMIETLLPENAKMTVVPPEGAIPVKRGATGETKVFTGNSNSPKSPT
KGGC
DddA3 (T1314A + T1380I + E1396K)
(SEQ ID NO: 31)
GSYALGPYQISAPQLPAYNGQTVGAFYYVNDAGGLESKVFSSGGPTPYPNYANAGHVEGQSALFMR
DNGISEGLVFHNNPEGTCGFCVNMIETLLPENAKMTVVPPKGAIPVKRGATGETKVFTGNSNSPKSPT
KGGC
DddA4 (T1380I + T1413I)
(SEQ ID NO: 30)
GSYALGPYQISAPQLPAYNGQTVGTFYYVNDAGGLESKVFSSGGPTPYPNYANAGHVEGQSALFMRD
NGISEGLVFHNNPEGTCGFCVNMIETLLPENAKMTVVPPEGAIPVKRGATGETKVFIGNSNSPKSPTKG
GC
DddA5 (Q1310R + S1330I + T1380I)
(SEQ ID NO: 29)
GSYALGPYQISAPQLPAYNGRTVGTFYYVNDAGGLESKVFISGGPTPYPNYANAGHVEGQSALFMRD
NGISEGLVFHNNPEGTCGFCVNMIETLLPENAKMTVVPPEGAIPVKRGATGETKVFTGNSNSPKSPTK
GGC
DddA6 (Q1310R + S1330I + T1380I + T1413I)
(SEQ ID NO: 45)
GSYALGPYQISAPQLPAYNGRTVGTFYYVNDAGGLESKVFISGGPTPYPNYANAGHVEGQSALFMRD
NGISEGLVFHNNPEGTCGFCVNMIETLLPENAKMTVVPPEGAIPVKRGATGETKVFIGNSNSPKSPTKG
GC
DddA7 (T1314A + G1344R + V1364M + E1370K + T1380I + T1413I)
(SEQ ID NO: 47)
GSYALGPYQISAPQLPAYNGQTVGAFYYVNDAGGLESKVFSSGGPTPYPNYANARHVEGQSALFMR
DNGISEGLMFHNNPKGTCGFCVNMIETLLPENAKMTVVPPEGAIPVKRGATGETKVFIGNSNSPKSPT
KGGC
DddA8 (N1342S + G1344R + V1364M + E1370K + T1380I + T1413I)
(SEQ ID NO: 48)
GSYALGPYQISAPQLPAYNGQTVGTFYYVNDAGGLESKVFSSGGPTPYPNYASARHVEGQSALFMRD
NGISEGLMFHNNPKGTCGFCVNMIETLLPENAKMTVVPPEGAIPVKRGATGETKVFIGNSNSPKSPTK
GGC
DddA9 (T1314A + G1344S + E1370K + T1380I + A1398T + T1413I)
(SEQ ID NO: 52)
GSYALGPYQISAPQLPAYNGQTVGAFYYVNDAGGLESKVFSSGGPTPYPNYANASHVEGQSALFMRD
NGISEGLVFHNNPKGTCGFCVNMIETLLPENAKMTVVPPEGTIPVKRGATGETKVFIGNSNSPKSPTKG
GC
DddA10 (T1314A + G1344S + E1370K + T1380I + E1396K + A1398T + T1413I)
(SEQ ID NO: 53)
GSYALGPYQISAPQLPAYNGQTVGAFYYVNDAGGLESKVFSSGGPTPYPNYANASHVEGQSALFMRD
NGISEGLVFHNNPKGTCGFCVNMIETLLPENAKMTVVPPKGTIPVKRGATGETKVFIGNSNSPKSPTK
GGC
DddA11 (S1330I + A1341V + N1342S + E1370K + T1380I + T1413I)
(SEQ ID NO: 54)
GSYALGPYQISAPQLPAYNGQTVGTFYYVNDAGGLESKVFISGGPTPYPNYVSAGHVEGQSALFMRD
NGISEGLVFHNNPKGTCGFCVNMIETLLPENAKMTVVPPEGAIPVKRGATGETKVFIGNSNSPKSPTK
GGC
DddA-7.9.1(E1325K + S1330I + A1341V + N1342S + E1370K + N1378S + T1380I +
T1413I)
(SEQ ID NO: 55)
GSYALGPYQISAPQLPAYNGQTVGTFYYVNDAGGLKSKVFISGGPTPYPNYVSAGHVEGQSALFMRD
NGISEGLVFHNNPKGTCGFCVSMIETLLPENAKMTVVPPEGAIPVKRGATGETKVFIGNSNSPKSPTKG
GC
DddA-7.12.1(S1330I + A1341I+ N1342S + E1370K + N1378S + T1380I + P1394S +
T1413I)
(SEQ ID NO: 56)
GSYALGPYQISAPQLPAYNGQTVGTFYYVNDAGGLESKVFISGGPTPYPNYISAGHVEGQSALFMRDN
GISEGLVFHNNPKGTCGFCVSMIETLLPENAKMTVVSPEGAIPVKRGATGETKVFIGNSNSPKSPTKGG
C
DddA-7.12.2 (S1330I + P1334S + A1341V+ N1342S + E1370K + N1378S + T1380I +
T1413I)
(SEQ ID NO: 57)
GSYALGPYQISAPQLPAYNGQTVGTFYYVNDAGGLESKVFISGGSTPYPNYVSAGHVEGQSALFMRD
NGISEGLVFHNNPKGTCGFCVSMIETLLPENAKMTVVPPEGAIPVKRGATGETKVFIGNSNSPKSPTKG
GC
DddA-7.12.3 (S1330I + P1334S + P1336S + A1341V+ N1342S + E1370K + N1378S +
T1380I + T1413I)
(SEQ ID NO: 58)
GSYALGPYQISAPQLPAYNGQTVGTFYYVNDAGGLESKVFISGGSTSYPNYVSAGHVEGQS
ALFMRDNGISEGLVFHNNPKGTCGFCVSMIETLLPENAKMTVVPPEGAIPVKRGATGETKVF
IGNSNSPKSPTKGGC

### Sequences Used in Fluorescence-Activated Cell Sorting of DdCBE Expressing Cells

[0732] Right-side halves of DdCBE have the general architecture of (from N- to C-terminus): COX8A MTS-3×FLAG-mitoTALE-GS linker-DddA half-SGGS linker-1×-UGI-GSG linker-P2A-eGFP-ATP5B 3′UTR

[0733] Right-side halves of DdCBE have the general architecture of (from N- to C-terminus): SOD2 MTS-3×HA-mitoTALE-GS linker-DddA half-SGGS linker-1×-UGI-GSG linker-P2A-mCherry-SOD2 3′UTR

P2A sequence
(SEQ ID NO: 223)
ATNFSLLKQAGDVEENPGP
eGFP sequence
(SEQ ID NO: 349)
MVSKGEELFTGVVPILVELDGDVNGHKFSVSGEGEGDATYGKLTLKFICT
TGKLPVPWPTLVTTLTYGVQCFSRYPDHMKQHDFFKSAMPEGYVQERTIF
FKDDGNYKTRAEVKFEGDTLVNRIELKGIDFKEDGNILGHKLEYNYNSHN
VYIMADKQKNGIKVNFKIRHNIEDGSVQLADHYQQNTPIGDGPVLLPDNH
YLSTQSALSKDPNEKRDHMVLLEFVTAAGITLGMDELYK
mCherry sequence
(SEQ ID NO: 350)
MVSKGEEDNMAIIKEFMRFKVHMEGSVNGHEFEIEGEGEGRPYEGTQTAK
LKVTKGGPLPFAWDILSPQFMYGSKAYVKHPADIPDYLKLSFPEGFKWER
VMNFEDGGVVTVTQDSSLQDGEFIYKVKLRGTNFPSDGPVMQKKTMGWEA
SSERMYPEDGALKGEIKQRLKLKDGGHYDAEVKTTYKAKKPVQLPGAYNV
NIKLDITSHNEDYTIVEQYERAEGRHSTGGMDELYK

### REFERENCES USED IN EXAMPLE 2

[0734] 1. Brüser, C., Keller-Findeisen, J. & Jakobs, S. The TFAM-to-mtDNA ratio defines inner-cellular nucleoid populations with distinct activity levels. Cell Rep 37, 110000, doi:10.1016/j.celrep.2021.110000 (2021).
[0735] 2. Kukat, C. et al. Super-resolution microscopy reveals that mammalian mitochondrial nucleoids have a uniform size and frequently contain a single copy of mtDNA. Proc Natl Acad Sci USA 108, 13534-13539, doi:10.1073/pnas.1109263108 (2011).
[0736] 3. Robin, E. D. & Wong, R. Mitochondrial DNA molecules and virtual number of mitochondria per cell in mammalian cells. J Cell Physiol 136, 507-513, doi:10.1002/jcp.1041360316 (1988).
[0737] 4. Yuan, Y. et al. Comprehensive molecular characterization of mitochondrial genomes in human cancers. Nature Genetics 52, 342-352, doi:10.1038/s41588-019-0557-x (2020).
[0738] 5. Schapira, A. H. Mitochondrial diseases. Lancet 379, 1825-1834, doi:10.1016/s0140-6736(11)61305-6 (2012).
[0739] 6. Vafai, S. B. & Mootha, V. K. Mitochondrial disorders as windows into an ancient organelle. Nature 491, 374-383, doi:10.1038/nature11707 (2012).
[0740] 7. Stewart, J. B. & Chinnery, P. F. Extreme heterogeneity of human mitochondrial DNA from organelles to populations. Nature Reviews Genetics 22, 106-118, doi:10.1038/s41576-020-00284-x (2021).
[0741] 8. Bacman, S. R., Williams, S. L., Pinto, M., Peralta, S. & Moraes, C. T. Specific elimination of mutant mitochondrial genomes in patient-derived cells by mitoTALENs. Nat Med 19, 1111-1113, doi:10.1038/nm.3261 (2013).
[0742] 9. Gammage, P. A., Rorbach, J., Vincent, A. I., Rebar, E. J. & Minczuk, M. Mitochondrially targeted ZFNs for selective degradation of pathogenic mitochondrial genomes bearing large-scale deletions or point mutations. EMBO Mol Med 6, 458-466, doi:10.1002/emmm.201303672 (2014).
[0743] 10. Peeva, V. et al. Linear mitochondrial DNA is rapidly degraded by components of the replication machinery. Nat Commun 9, 1727, doi:10.1038/s41467-018-04131-w (2018).
[0744] 11. Nissanka, N., Bacman, S. R., Plastini, M. J. & Moraes, C. T. The mitochondrial DNA polymerase gamma degrades linear DNA fragments precluding the formation of deletions. Nat Commun 9, 2491, doi:10.1038/s41467-018-04895-1 (2018).
[0745] 12. Jackson, C. B., Turnbull, D. M., Minczuk, M. & Gammage, P. A. Therapeutic Manipulation of mtDNA Heteroplasmy: A Shifting Perspective. Trends Mol Med 26, 698-709, doi:10.1016/j.molmed.2020.02.006 (2020).
[0746] 13. Komor, A. C., Kim, Y. B., Packer, M. S., Zuris, J. A. & Liu, D. R. Programmable editing of a target base in genomic DNA without double-stranded DNA cleavage. Nature 533, 420, doi:10.1038/nature17946
[0747] 14. Gaudelli, N. M. et al. Programmable base editing of A⋅T to G⋅C in genomic DNA without DNA cleavage. Nature 551, 464, doi:10.1038/nature24644 nature.com/articles/nature24644 #supplementary-information (2017).
[0748] 15. Anzalone, A. V. et al. Search-and-replace genome editing without double-strand breaks or donor DNA. Nature, doi:10.1038/s41586-019-1711-4 (2019).
[0749] 16. Gammage, P. A., Moraes, C. T. & Minczuk, M. Mitochondrial Genome Engineering: The Revolution May Not Be CRISPR-Ized. Trends Genet 34, 101-110, doi:10.1016/j.tig.2017.11.001 (2018).
[0750] 17. Mok, B. Y. et al. A bacterial cytidine deaminase toxin enables CRISPR-free mitochondrial base editing. Nature 583, 631-637, doi:10.1038/s41586-020-2477-4 (2020).
[0751] 18. Lee, H. et al. Mitochondrial DNA editing in mice with DddA-TALE fusion deaminases. Nat Commun 12, 1190, doi:10.1038/s41467-021-21464-1 (2021).
[0752] 19. Kang, B. C. et al. Chloroplast and mitochondrial DNA editing in plants. Nat Plants 7, 899-905, doi:10.1038/s41477-021-00943-9 (2021).
[0753] 20. Guo, J. et al. Precision modeling of mitochondrial diseases in zebrafish via DdCBE-mediated mtDNA base editing. Cell Discovery 7, 78, doi:10.1038/s41421-021-00307-9 (2021).
[0754] 21. Thuronyi, B. W. et al. Continuous evolution of base editors with expanded target compatibility and improved activity. Nat Biotechnol 37, 1070-1079, doi:10.1038/s41587-019-0193-0 (2019).
[0755] 22. Roth, T. B., Woolston, B. M., Stephanopoulos, G. & Liu, D. R. Phage-Assisted Evolution of Bacillus methanolicus Methanol Dehydrogenase 2. ACS Synthetic Biology 8, 796-806, doi:10.1021/acssynbio.8b00481 (2019).
[0756] 23. Esvelt, K. M., Carlson, J. C. & Liu, D. R. A system for the continuous directed evolution of biomolecules. Nature 472, 499-503, doi:10.1038/nature09929 (2011).
[0757] 24. Badran, A. H. & Liu, D. R. Development of potent in vivo mutagenesis plasmids with broad mutational spectra. Nat Commun 6, 8425, doi:10.1038/ncomms9425 (2015).
[0758] 25. Carlson, J. C., Badran, A. H., Guggiana-Nilo, D. A. & Liu, D. R. Negative selection and stringency modulation in phage-assisted continuous evolution. Nature Chemical Biology 10, 216-222, doi:10.1038/nchembio.1453 (2014).
[0759] 26. Szymczak, A. L. et al. Correction of multi-gene deficiency in vivo using a single ‘self-cleaving’ 2A peptide-based retroviral vector. Nature Biotechnology 22, 589-594, doi:10.1038/nbt957 (2004).
[0760] 27. Reyon, D. et al. FLASH assembly of TALENs for high-throughput genome editing. Nature Biotechnology 30, 460-465, doi:10.1038/nbt.2170 (2012).
[0761] 28. Fine, E. J., Cradick, T. J., Zhao, C. L., Lin, Y. & Bao, G. An online bioinformatics tool predicts zinc finger and TALE nuclease off-target cleavage. Nucleic Acids Research 42, e42-e42, doi:10.1093/nar/gkt1326 (2013).
[0762] 29. Cuculis, L., Abil, Z., Zhao, H. & Schroeder, C. M. Direct observation of TALE protein dynamics reveals a two-state search mechanism. Nature Communications 6, 7277, doi:10.1038/ncomms8277 (2015).
[0763] 30. Streubel, J., Blucher, C., Landgraf, A. & Boch, J. TAL effector RVD specificities and efficiencies. Nature Biotechnology 30, 593-595, doi:10.1038/nbt.2304 (2012).
[0764] 31. Liao, Z. et al. The ND4 G11696A mutation may influence the phenotypic manifestation of the deafness-associated 12S rRNA A1555G mutation in a four-generation Chinese family. Biochem Bioph Res Co 362, 670-676, doi:https://doi.org/10.1016/j.bbrc.2007.08.034 (2007).
[0765] 32. Gopal, R. K. et al. Early loss of mitochondrial complex I and rewiring of glutathione metabolism in renal oncocytoma. Proc Natl Acad Sci USA 115, E6283-E6290, doi:10.1073/pnas.1711888115 (2018).
[0766] 33. Gehrke, J. M. et al. An APOBEC3A-Cas9 base editor with minimized bystander and off-target activities. Nat Biotechnol 36, 977-982, doi:10.1038/nbt.4199 (2018).
[0767] 34. Hubbard, B. P. et al. Continuous directed evolution of DNA-binding proteins to improve TALEN specificity. Nat Methods 12, 939-942, doi:10.1038/nmeth.3515 (2015).
[0768] 35. Badran, A. H. et al. Continuous evolution of Bacillus thuringiensis toxins overcomes insect resistance. Nature 533, 58-63, doi:10.1038/nature17938 (2016).
[0769] 36. Clement, K. et al. CRISPResso2 provides accurate and rapid genome editing sequence analysis. Nat Biotechnol 37, 224-226, doi:10.1038/s41587-019-0032-3 (2019).
[0770] 37. Shen, W., Le, S., Li, Y. & Hu, F. SeqKit: A Cross-Platform and Ultrafast Toolkit for FASTA/Q File Manipulation. PLOS ONE 11, e0163962, doi:10.1371/journal.pone.0163962 (2016).
[0771] 38. Doman, J. L., Raguram, A., Newby, G. A. & Liu, D. R. Evaluation and minimization of Cas9-independent off-target DNA editing by cytosine base editors. Nature Biotechnology, doi:10.1038/s41587-020-0414-6 (2020).
[0772] 39. Diroma, M. A., Ciaccia, L., Pesole, G. & Picardi, E. Elucidating the editome: bioinformatics approaches for RNA editing detection. Brief Bioinform 20, 436-447, doi:10.1093/bib/bbx129 (2019).
[0773] 40. Yu, Q. et al. Single-strand specificity of APOBEC3G accounts for minus-strand deamination of the HIV genome. Nat Struct Mol Biol 11, 435-442, doi:10.1038/nsmb758 (2004).
[0774] 41. Maiti, A. et al. Crystal structure of the catalytic domain of HIV-1 restriction factor APOBEC3G in complex with ssDNA. Nature Communications 9, 2460, doi:10.1038/s41467-018-04872-8 (2018).
[0775] 42. Rathore, A. et al. The Local Dinucleotide Preference of APOBEC3G Can Be Altered from 5′-CC to 5′-TC by a Single Amino Acid Substitution. Journal of Molecular Biology 425, 4442-4454, doi:https://doi.org/10.1016/j.jmb.2013.07.040 (2013).
[0776] 43. Fine, E. J., Cradick, T. J., Zhao, C. L., Lin, Y. & Bao, G. An online bioinformatics tool predicts zinc finger and TALE nuclease off-target cleavage. Nucleic Acids Research 42, e42-e42, doi:10.1093/nar/gkt1326 (2013).
[0777] 44. Bacman, S. R. et al. MitoTALEN reduces mutant mtDNA load and restores tRNA(Ala) levels in a mouse model of heteroplasmic mtDNA mutation. Nat Med 24, 1696-1700, doi:10.1038/s41591-018-0166-8 (2018).
[0778] 45. Mok, B. Y. et al. A bacterial cytidine deaminase toxin enables CRISPR-free mitochondrial base editing. Nature 583, 631-637, doi:10.1038/s41586-020-2477-4 (2020).

TABLE 9
List of predicted off-target nuclear DNA sites for SIRT6-DdCBE and JAK2-DdCBE

| | | | | | | | | | | | | | | | |
|---|---|---|---|---|---|---|---|---|---|---|---|---|---|---|---|
| | | | Nuclease | | | Left | | Right | Chromo- | Chromo- | | | | | Forward |
| | Homology | RVD | Orienta- | Spacer | Mis- | Half | Spacer | Half | some | some | Genomic | Closest | Primer | Forward | Melt |
| Ranking | Score | Score | tion | Length | matches | Site | Seq | Site | Name | Location | Region | Gene | Index | Primer | Temp |

JAK2-DdCBE

| | | | | | | | | | | | | | | | |
|---|---|---|---|---|---|---|---|---|---|---|---|---|---|---|---|
| 1 | 13 | 2.818 | L-20-R | 20 | 5_4 | gCTaA | atagaca | AGGTA | chr18 | 61057152 | Exon | VPS4B | 018- | GTGTG | 60.908 |
| | | | | | | AAAAG | attttctt | AAGAC | | | | | 061056920 | GTCAG | |
| | | | | | | ACaCT | cttta | AaTgtCt | | | | | | GACAA | |
| | | | | | | GaA | (SEQ | a (SEQ | | | | | | ACTGT | |
| | | | | | | (SEQ | ID NO: | ID NO: | | | | | | TCCC | |
| | | | | | | ID NO: | 571) | 671) | | | | | | (SEQ ID | |
| | | | | | | 423) | | | | | | | | NO: | |
| | | | | | | | | | | | | | | 722) | |
| 2 | 10 | 2.827 | L-12-R | 12 | 6_4 | TaaaA | ctataatgt | AaGTA | chr5 | 93680784 | Intron | KIAA0825 | 005- | GGGGC | 61.508 |
| | | | | | | AAAAa | tag | AAGAtA | | | | | 093680605 | TGGGA | |
| | | | | | | AgTCT | (SEQ ID | GTAGtA | | | | | | GAAGA | |
| | | | | | | GgA | NO: | a (SEQ | | | | | | GAGGA | |
| | | | | | | (SEQ | 572) | ID NO: | | | | | | A (SEQ | |
| | | | | | | ID NO: | | 522) | | | | | | ID NO: | |
| | | | | | | 424) | | | | | | | | 723) | |
| 3 | 26 | 2.834 | L-11-R | 11 | 6_2 | TCTGA | cacaggc | AGGaA | chr2 | 146083472 | Intergenic | DKFZp686O1327 | 002- | GTCCA | 59.148 |
| | | | | | | gCTCT | ctgc | AAGAg | | | | | 146083255 | CTCTG | |
| | | | | | | AAAAa | (SEQ ID | AGaAG | | | | | | TGTTA | |
| | | | | | | GCA | NO: | gca | | | | | | CCCAG | |
| | | | | | | (SEQ | 573) | (SEQ ID | | | | | | ATC | |
| | | | | | | ID NO: | | NO: | | | | | | (SEQ ID | |
| | | | | | | 425) | | 523) | | | | | | NO: | |
| | | | | | | | | | | | | | | 724) | |
| 4 | 20 | 2.836 | L-17-R | 17 | 5_3 | TCctAA | cgcatgta | AGcTAA | chr9 | 7420649 | Intergenic | TMEM2 | 009- | GCCGG | 61.088 |
| | | | | | | AAAGA | gctaggg | gGtCAG | | | | | 074206275 | TTTAG | |
| | | | | | | CTCTc | aa (SEQ | TgGCAg | | | | | | GTATG | |
| | | | | | | CA | ID NO: | (SEQ ID | | | | | | GGAAC | |
| | | | | | | (SEQ | 574) | NO: 524) | | | | | | CAC | |
| | | | | | | ID NO: | | | | | | | | (SEQ ID | |
| | | | | | | 426) | | | | | | | | NO: 725) | |
| 5 | 5 | 2.848 | R-11-L | 11 | 6_5 | tTaCTt | gatgatac | aGtgGA | chr10 | 119782471 | Intron | FIP2RAB11 | 010- | TTACC | 61.508 |
| | | | | | | aTaTC | att (SEQ | GTgTTT | | | | | 119782198 | CCTGG | |
| | | | | | | TaTAC | ID NO: | TTCAGt | | | | | | ATCCC | |
| | | | | | | CT | 575) | (SEQ ID | | | | | | CTCCC | |
| | | | | | | (SEQ | | NO: 525) | | | | | | T (SEQ | |
| | | | | | | ID NO: | | | | | | | | ID NO: | |
| | | | | | | 427) | | | | | | | | 726) | |
| 6 | 18 | 2.854 | R-17-L | 17 | 4_4 | cTGCTt | tttttttttt | TGCAG | chr11 | 12572661 | Intergenic | PARVA | 011- | GGTGT | 61.508 |
| | | | | | | CTcTC | tttttga | AGTCT | | | | | 012572487 | GAATC | |
| | | | | | | TTTACt | (SEQ ID | TgcTCt | | | | | | CGGGA | |
| | | | | | | T (SEQ | NO: | Gt (SEQ | | | | | | GGCAG | |
| | | | | | | ID NO: | 576) | ID NO: | | | | | | A (SEQ | |
| | | | | | | 428) | | 526) | | | | | | ID NO: | |
| | | | | | | | | | | | | | | 727) | |
| 7 | 5 | 2.86 | R-11-L | 11 | 6_5 | AaaaT | gctatccc | TGttGtG | chr4 | 176196444 | Intergenic | ADAM29 | 004- | GGAAC | 60.298 |
| | | | | | | ACTaT | atg | TtcTTTT | | | | | 176196333 | AGTGA | |
| | | | | | | CTcTA | (SEQ ID | tAGA | | | | | | TCAGT | |
| | | | | | | CCT | NO: | (SEQ ID | | | | | | TCTGT | |
| | | | | | | (SEQ | 577) | NO: | | | | | | TACCT | |
| | | | | | | ID NO: | | 527) | | | | | | GAC | |
| | | | | | | 429) | | | | | | | | (SEQ ID | |
| | | | | | | | | | | | | | | NO: | |
| | | | | | | | | | | | | | | 728) | |
| 8 | 10 | 2.876 | L-10-R | 10 | 6_4 | TCTcA | ttttaaaga | AGGTA | chr6 | 43313083 | Intron | ZNF318 | 006- | GCTAC | 61.508 |
| | | | | | | AAcca | g (SEQ | AAGAa | | | | | 043312871 | TGGGG | |
| | | | | | | ACTaT | ID NO: | AGaAG | | | | | | AGCCT | |
| | | | | | | aCA | 578) | aAa | | | | | | GAAGT | |
| | | | | | | (SEQ | | (SEQ ID | | | | | | G (SEQ | |
| | | | | | | ID NO: | | NO: | | | | | | ID NO: | |
| | | | | | | 430) | | 528) | | | | | | 729) | |
| 9 | 17 | 2.878 | L-12-R | 12 | 6_3 | TCTcA | aaacaaa | AGagAA | chr3 | 8587815 | Intron | LMCD1 | 003- | TCCGG | 61.508 |
| | | | | | | AAAAa | aaaaa | AGtCAG | | | | | 008587704 | ATTCT | |
| | | | | | | ACaaa | (SEQ ID | TAGCA | | | | | | CCTGC | |
| | | | | | | aCA | NO: 579) | T (SEQ | | | | | | TGAGG | |
| | | | | | | (SEQ | | ID NO: | | | | | | C (SEQ | |
| | | | | | | ID NO: | | 529) | | | | | | ID NO: | |
| | | | | | | 431) | | | | | | | | 730) | |
| 10 | 18 | 2.882 | R-17-L | 17 | 4_4 | ATaCT | attcctttg | TGtAGA | chr5 | 66297316 | Intron | MAST4 | 005- | CCGAC | 59.508 |
| | | | | | | caTGT | agaatttc | GgCTTT | | | | | 066297056 | TGCTC | |
| | | | | | | CTTTA | (SEQ ID | cTCAaA | | | | | | TGCCT | |
| | | | | | | CCc (SEQ | NO: 580) | (SEQ ID | | | | | | TCTGA | |
| | | | | | | ID NO: | | NO: 530) | | | | | | (SEQ ID | |
| | | | | | | 432) | | | | | | | | NO: | |
| | | | | | | | | | | | | | | 731) | |
| 11 | 18 | 2.884 | R-17-L | 17 | 4_4 | taGCT | tacagaa | aGCtGA | chr13 | 83643339 | Intergenic | SLITRK1 | 013- | GGCTA | 59.508 |
| | | | | | | ACTaT | aaaaaaa | cTCTTT | | | | | 083643051 | GGGGA | |
| | | | | | | CTgTA | aag | TTCtGA | | | | | | ACTCG | |
| | | | | | | CCT (SEQ | (SEQ ID | (SEQ ID | | | | | | ATGTC | |
| | | | | | | ID NO: | NO: | NO: | | | | | | (SEQ ID | |
| | | | | | | 433) | 581) | 531) | | | | | | NO: | |
| | | | | | | | | | | | | | | 732) | |
| 12 | 8 | 2.888 | R-11-L | 11 | 5_5 | tTaCTA | ataattttgt | TGaAtA | chr5 | 139007256 | Exon | UBE2D2 | 005- | GTGAT | 59.148 |
| | | | | | | CaGTC | g (SEQ | GgCTTT | | | | | 139006977 | GGGCT | |
| | | | | | | aTTAC | ID NO: | TTCAtt | | | | | | TTGTT | |
| | | | | | | aT (SEQ | 582) | (SEQ ID | | | | | | CCCAA | |
| | | | | | | ID NO: | | NO: 532) | | | | | | CTC | |
| | | | | | | 434) | | | | | | | | (SEQ ID | |
| | | | | | | | | | | | | | | NO: | |
| | | | | | | | | | | | | | | 733) | |
| 13 | 5 | 2.895 | R-17-L | 17 | 6_5 | tTcCTc | atcagttat | TttAaAG | chr1 | 235172003 | Intergenic | TOMM20 | 001- | CAAGA | 60.908 |
| | | | | | | CTtTC | aatcattt | TtTTTT | | | | | 235171809 | TAGGG | |
| | | | | | | TTaAC | (SEQ ID | TtAGA | | | | | | CCTTG | |
| | | | | | | aT | NO: 583) | (SEQ ID | | | | | | CTGTG | |
| | | | | | | (SEQ | | NO: 533) | | | | | | TTGC | |
| | | | | | | ID NO: | | | | | | | | (SEQ ID | |
| | | | | | | 435) | | | | | | | | NO: 734) | |
| 14 | 13 | 2.895 | R-18-L | 18 | 5_4 | cTcCac | tgcgcac | gGaAG | chr2 | 5508616 | Intergenic | SOX11 | 002- | CCTGG | 61.088 |
| | | | | | | CTGTC | acactgttt | AtgCTT | | | | | 005508374 | GATGG | |
| | | | | | | TTTAC | gg (SEQ | TTTCtG | | | | | | GAATC | |
| | | | | | | CT (SEQ | ID NO: | A (SEQ | | | | | | AGAAC | |
| | | | | | | ID NO: | 584) | ID NO: | | | | | | TGC | |
| | | | | | | 436) | | 534) | | | | | | (SEQ ID | |
| | | | | | | | | | | | | | | NO: 735) | |
| 15 | 17 | 2.907 | L-10-R | 10 | 6_3 | TCTGA | gttataga | AtGTAg | chrX | 87145708 | Intergenic | KLHL4 | 00X- | CAGGT | 59.038 |
| | | | | | | AAAAG | aa (SEQ | AGACA | | | | | 087145430 | ATTAT | |
| | | | | | | ACatTc | ID NO: | GggGgA | | | | | | GTTAG | |
| | | | | | | CA (SEQ | 585) | a (SEQ | | | | | | GCCAT | |
| | | | | | | ID NO: | | ID NO: | | | | | | GGGG | |
| | | | | | | 437) | | 535) | | | | | | (SEQ ID | |
| | | | | | | | | | | | | | | NO: 736) | |
| 16 | 5 | 2.915 | L-20-R | 20 | 6_5 | gCTaA | agttgcttt | AGGgA | chr15 | 72509552 | Intron | PKM | 015- | CGTTC | 61.288 |
| | | | | | | AAgAG | gtcagga | AgGAgA | | | | | 072509312 | TCATG | |
| | | | | | | ACTCa | caag | GTAGg | | | | | | GACCT | |
| | | | | | | GCc (SEQ | (SEQ ID | ga (SEQ | | | | | | GCCCA | |
| | | | | | | ID NO: | NO: | ID NO: | | | | | | GT | |
| | | | | | | 438) | 586) | 536) | | | | | | (SEQ ID | |
| | | | | | | | | | | | | | | NO: | |
| | | | | | | | | | | | | | | 737) | |
| 17 | 13 | 2.922 | R-10-L | 10 | 5 4 | ATcCTt | caccttca | TGaAG | chr14 | 99037124 | Intergenic | C14orf177 | 014- | CTATC | 59.848 |
| | | | | | | CTGTC | tt (SEQ | AGTaTT | | | | | 099036828 | AGTGA | |
| | | | | | | TTTAat | ID NO: | TTTtAtg | | | | | | AATCTT | |
| | | | | | | T (SEQ | 587) | (SEQ ID | | | | | | TGCCC | |
| | | | | | | ID NO: | | NO: | | | | | | ATTCT | |
| | | | | | | 439) | | 537) | | | | | | GTTTG | |
| | | | | | | | | | | | | | | C (SEQ | |
| | | | | | | | | | | | | | | ID NO: | |
| | | | | | | | | | | | | | | 738) | |
| 18 | 10 | 2.926 | L-18-R | 18 | 6_4 | gCTaA | ttattgaaa | AGGTA | chr12 | 52849222 | Intergenic | KRT6B | 012- | GGGCT | 59.258 |
| | | | | | | AAcAa | atttccaa | AAGAg | | | | | 052848936 | TCCCT | |
| | | | | | | ACTtT | c (SEQ | AacAGt | | | | | | TTCTTC | |
| | | | | | | GtA | ID NO: | AT | | | | | | CACTA | |
| | | | | | | (SEQ | 588) | (SEQ ID | | | | | | G (SEQ | |
| | | | | | | ID NO: | | NO: | | | | | | ID NO: | |
| | | | | | | 440) | | 538) | | | | | | 739) | |
| 19 | 10 | 2.926 | R-18-L | 18 | 6_4 | tTtaTA | cctactgg | TtCtGA | chr2 | 80045175 | Intron | CTNNA2 | 002- | CCCCT | 61.508 |
| | | | | | | CaGTg | gtgtttcttt | GTCTT | | | | | 080045032 | CTCCC | |
| | | | | | | TTTAa | (SEQ ID | TTTtAG | | | | | | AAAAG | |
| | | | | | | CT | NO: 589) | c (SEQ | | | | | | GAGAG | |
| | | | | | | (SEQ | | ID NO: | | | | | | C (SEQ | |
| | | | | | | ID NO: | | 539) | | | | | | ID NO: | |
| | | | | | | 441) | | | | | | | | 740) | |
| 20 | 5 | 2.926 | L-19-R | 19 | 6_5 | aCTctA | gtgctttgc | tGGaAA | chr9 | 87248678 | Intergenic | NTRK2 | 009- | GCAAG | 59.258 |
| | | | | | | AAAaA | agtttatttt | AGAgA | | | | | 408728380 | TGATA | |
| | | | | | | CTCTta | (SEQ ID | GTAGg | | | | | | CAACC | |
| | | | | | | A (SEQ | NO: | Ag | | | | | | CCAAG | |
| | | | | | | ID NO: | 590) | (SEQ ID | | | | | | CC | |
| | | | | | | 442) | | NO: | | | | | | (SEQ ID | |
| | | | | | | | | 540) | | | | | | NO: 741) | |
| 21 | 13 | 2.932 | R-11-L | 11 | 5_4 | AcGCT | gcattatc | TGCAatt | chr5 | 160334359 | Intergenic | LCC285629 | 005- | CCAGC | 61.288 |
| | | | | | | AaacT | cta | TtTTTT | | | | | 160334092 | CTTCA | |
| | | | | | | CTTTA | (SEQ ID | (SEQ ID | | | | | | GTTTG | |
| | | | | | | CCT | NO: 591) | NO: 541) | | | | | | CCAAG | |
| | | | | | | (SEQ | | TgAGA | | | | | | GG | |
| | | | | | | ID NO: | | | | | | | | (SEQ ID | |
| | | | | | | 443) | | | | | | | | NO: 742) | |
| 22 | 10 | 2.934 | R-20-L | 20 | 6_4 | taaCTA | cttagaga | TGtcaA | chr3 | 99365326 | Intron | MIR548G | 003- | GCACA | 61.288 |
| | | | | | | CctTCT | catgtgag | GTaTTT | | | | | 65077 | CCAGA | |
| | | | | | | TTACC | gtcc | TTCAG | | | | | | GGAGA | |
| | | | | | | a (SEQ | (SEQ ID | A (SEQ | | | | | | GCTGC | |
| | | | | | | ID NO: | NO: | ID NO: | | | | | | TT | |
| | | | | | | 444) | 592) | 542) | | | | | | (SEQ ID | |
| | | | | | | | | | | | | | | NO: | |
| | | | | | | | | | | | | | | 743) | |
| 23 | 10 | 2.937 | R-18-L | 18 | 6_4 | cTaCTt | tttcacttat | TcttcAG | chr14 | 38009449 | Intron | MIPQL1 | 014- | CCCAG | 61.508 |
| | | | | | | CTacC | gaattcat | TCTTTT | | | | | 038009333 | TCTTG | |
| | | | | | | TTcAC | (SEQ ID | TCAGA | | | | | | GGCAG | |
| | | | | | | CT | NO: 593) | (SEQ ID | | | | | | CCCTT | |
| | | | | | | (SEQ | | NO: 543) | | | | | | T (SEQ | |
| | | | | | | ID NO: | | | | | | | | ID NO: | |
| | | | | | | 445) | | | | | | | | 744) | |
| 24 | 17 | 2.94 | L-20-R | 20 | 6_3 | aCTaA | atactaga | AGGTA | chr7 | 8656336 | Intron | NXPH1 | 007- | GCATT | 59.148 |
| | | | | | | AAAAa | ggcaaaa | AAGACt | | | | | 008656230 | TAGGA | |
| | | | | | | AgTgT | aaggt | GgAtCA | | | | | | CAGAG | |
| | | | | | | GgA (SEQ | (SEQ ID | T (SEQ | | | | | | AGCGA | |
| | | | | | | ID NO: | NO: | ID NO: | | | | | | AGC | |
| | | | | | | 446) | 594) | 544) | | | | | | (SEQ ID | |
| | | | | | | | | | | | | | | NO: | |
| | | | | | | | | | | | | | | 745) | |
| 25 | 13 | 2.946 | R-20-L | 20 | 5_4 | ATtCT | cttagctc | TGCAGt | chr1 | 187871060 | Intergenic | PLA2G4A | 001- | GGCCC | 61.508 |
| | | | | | | ACTGg | ctgtggtg | aTtTgTT | | | | | 187870884 | TTGCT | |
| | | | | | | CaTTA | ggta | TCAGt | | | | | | ATGCC | |
| | | | | | | CaT (SEQ | (SEQ ID | (SEQ ID | | | | | | AGGGA | |
| | | | | | | ID NO: | NO: | NO: 545) | | | | | | A (SEQ | |
| | | | | | | 447) | 595) | | | | | | | ID NO: | |
| | | | | | | | | | | | | | | 746) | |
| 26 | 5 | 2.947 | R-12-L | 12 | 6_5 | tTGCa | tgttccatc | cGgAG | chr12 | 90462283 | Intergenic | LOC338758 | 012- | CACCA | 61.508 |
| | | | | | | ACTaT | att (SEQ | AtTtTTT | | | | | 090462066 | TTCTC | |
| | | | | | | CcTTtC | ID NO: | TTtAGA | | | | | | CCTGC | |
| | | | | | | Cc (SEQ | 596) | (SEQ ID | | | | | | CTCAG | |
| | | | | | | ID NO: | | NO: 546) | | | | | | C (SEQ | |
| | | | | | | 448) | | | | | | | | ID NO: | |
| | | | | | | | | | | | | | | 747) | |
| 27 | 2 | 2.947 | L-19-R | 19 | 6_6 | TCTcA | aataaaa | gGGTg | chr1 | 117309480 | Intron | CD2 | 001- | CAGGA | 61.508 |
| | | | | | | AAAAa | aacaaaa | AAcAgA | | | | | 117309377 | GGCTG | |
| | | | | | | ACaaa | atagt | GTAGtA | | | | | | AGGTG | |
| | | | | | | aCA (SEQ | (SEQ ID | a (SEQ | | | | | | GGTGA | |
| | | | | | | ID NO: | NO: | ID NO: | | | | | | A (SEQ | |
| | | | | | | 431) | 597) | 547) | | | | | | ID NO: | |
| | | | | | | | | | | | | | | 748) | |
| 28 | 10 | 2.949 | L-11-R | 11 | 6_4 | aaTtAA | tgtccttca | AGGTg | chr3 | 121399914 | Intron | GOLGB1 | 003- | GCTAG | 59.378 |
| | | | | | | AAAcA | ac (SEQ | AAtACA | | | | | 121399809 | CATTT | |
| | | | | | | aTaTG | ID NO: | GTgGtA | | | | | | GCACT | |
| | | | | | | CA (SEQ | 598) | T (SEQ | | | | | | CCTGG | |
| | | | | | | ID NO: | | ID NO: | | | | | | G (SEQ | |
| | | | | | | 449) | | 548) | | | | | | ID NO: | |
| | | | | | | | | | | | | | | 749) | |
| 29 | 8 | 2.95 | R-11-L | 11 | 5_5 | ATcCa | ccgaatttt | TGttGtG | chr1 | 40370608 | Intergenic | MYCL1 | 001- | CACCT | 61.508 |
| | | | | | | cCTGT | tt (SEQ | TtTTTT | | | | | 040370321 | GTCAC | |
| | | | | | | CTTgg | ID NO: | TgAGA | | | | | | CACGC | |
| | | | | | | CCT | 599) | (SEQ ID | | | | | | CTAGC | |
| | | | | | | (SEQ | | NO: | | | | | | T (SEQ | |
| | | | | | | ID NO: | | 549) | | | | | | ID NO: | |
| | | | | | | 450) | | | | | | | | 750) | |
| 30 | 13 | 2.951 | L-15-R | 15 | 5 4 | TCTaA | taattgttta | AGaaAA | chr13 | 19256886 | Intergenic | ANKRD20A9P | 013- | GTACA | 59.578 |
| | | | | | | AAAAG | aaaaa | AGACA | | | | | 019256623 | GAGTA | |
| | | | | | | AaTCa | (SEQ ID | aTAGtA | | | | | | ACCTA | |
| | | | | | | aaA (SEQ | NO: 600) | T (SEQ | | | | | | TAAGT | |
| | | | | | | ID NO: | | ID NO: | | | | | | GTGAC | |
| | | | | | | 451) | | 550) | | | | | | ATACTT | |
| | | | | | | | | | | | | | | TTGC | |
| | | | | | | | | | | | | | | (SEQ ID | |
| | | | | | | | | | | | | | | NO: 751) | |
| 31 | 5 | 2.951 | R-18-L | 18 | 6_5 | AaatTA | ttaaatttgt | TttAGA | chr8 | 104573187 | Intron | RIMS2 | 008- | GGGGA | 59.958 |
| | | | | | | CTaTC | aagcattt | GTtTgT | | | | | 104572889 | TTCAG | |
| | | | | | | TgTAC | (SEQ ID | TTgAtA | | | | | | AGATT | |
| | | | | | | CT | NO: 601) | (SEQ ID | | | | | | GTTAA | |
| | | | | | | (SEQ | | NO: 551) | | | | | | AGAAC | |
| | | | | | | ID NO: | | | | | | | | ACAAG | |
| | | | | | | 452) | | | | | | | | G (SEQ | |
| | | | | | | | | | | | | | | ID NO: | |
| | | | | | | | | | | | | | | 752) | |
| 32 | 20 | 2.955 | R-15-L | 15 | 5_3 | ATGCT | atgtatata | TtCAtAt | chr4 | 116455083 | Intergenic | NDST4 | 004- | GCACC | 59.958 |
| | | | | | | tCTcTa | tacaca | aCTTTT | | | | | 116454862 | TTGTC | |
| | | | | | | TTTAC | (SEQ ID | TCAGt | | | | | | TATTTC | |
| | | | | | | CT (SEQ | NO: 602) | (SEQ ID | | | | | | TTAGA | |
| | | | | | | ID NO: | | NO: 552) | | | | | | GTTGT | |
| | | | | | | 453) | | | | | | | | TGAGC | |
| | | | | | | | | | | | | | | (SEQ ID | |
| | | | | | | | | | | | | | | NO: | |
| | | | | | | | | | | | | | | 753) | |
| 33 | 10 | 2.956 | R-18-L | 18 | 6_4 | ATcCT | agccagc | TGCAGt | chr7 | 98432906 | Intergenic | TMEM130 | 007- | AGTTT | 61.508 |
| | | | | | | AtTtTC | tctttgata | GTgTTT | | | | | 098432808 | GCGTC | |
| | | | | | | TTTAat | ac (SEQ | TTtAGg | | | | | | TGAGC | |
| | | | | | | g (SEQ | ID NO: | (SEQ ID | | | | | | CTGGC | |
| | | | | | | ID NO: | 603) | NO: 553) | | | | | | C (SEQ | |
| | | | | | | 454) | | | | | | | | ID NO: | |
| | | | | | | | | | | | | | | 754) | |
| 34 | 5 | 2.96 | R-18-L | 18 | 6_5 | cTaCa | ttccctga | TGCAtA | chr12 | 107506088 | Intergenic | CRY1 | 012- | CTGAA | 59.378 |
| | | | | | | AaTGa | aagataa | GTtTTg | | | | | 107505826 | TGGTG | |
| | | | | | | CTTTc | caa | TatAGA | | | | | | AGGGC | |
| | | | | | | CCT | (SEQ ID | (SEQ ID | | | | | | TCCCT | |
| | | | | | | (SEQ | NO: | NO: 554) | | | | | | T (SEQ | |
| | | | | | | ID NO: | 604) | | | | | | | ID NO: | |
| | | | | | | 455) | | | | | | | | 755) | |
| 35 | 2 | 2.96 | L-15-R | 15 | 6_6 | gCacA | ggggaat | AGGTtA | chr20 | 4296665 | Intergenic | ADRA1D | 020- | GTCTC | 59.148 |
| | | | | | | AAAAa | acttggta | AaAgAG | | | | | 004296488 | CCAGG | |
| | | | | | | ACTCT | (SEQ ID | TtGaAc | | | | | | GGAAG | |
| | | | | | | aCt (SEQ | NO: 605) | (SEQ ID | | | | | | AATCA | |
| | | | | | | ID NO: | | NO: 555) | | | | | | TAG | |
| | | | | | | 456) | | | | | | | | (SEQ ID | |
| | | | | | | | | | | | | | | NO: | |
| | | | | | | | | | | | | | | 756) | |
| 36 | 5 | 2.965 | R-10-L | 10 | 6_5 | tTGCct | tatttctata | TGtAaA | chr2 | 30843806 | Intron | LCLAT1 | 002- | CAGGT | 61.508 |
| | | | | | | CTGTC | (SEQ ID | GgCTTT | | | | | 030843698 | CCACA | |
| | | | | | | TTcAC | NO: 606) | TTttGg | | | | | | AACCC | |
| | | | | | | Ca | | (SEQ ID | | | | | | CTCCC | |
| | | | | | | (SEQ | | NO: 556) | | | | | | A (SEQ | |
| | | | | | | ID NO: | | | | | | | | ID NO: | |
| | | | | | | 457) | | | | | | | | 757) | |
| 37 | 5 | 2.965 | L-13-R | 13 | 6_5 | aCTcA | gtcacac | AaGTtAt | chr8 | 116589056 | Intron | TRPS1 | 008- | TCACC | 61.508 |
| | | | | | | AAAAc | agcata | TAttAg | | | | | 116588765 | CAGGG | |
| | | | | | | ACTCa | (SEQ ID | GACAG | | | | | | TCACA | |
| | | | | | | GtA | NO: 607) | (SEQ ID | | | | | | CGGCT | |
| | | | | | | (SEQ | | NO: | | | | | | A (SEQ | |
| | | | | | | ID NO: | | 557) | | | | | | ID NO: | |
| | | | | | | 458) | | | | | | | | 758) | |
| 38 | 5 | 2.969 | R-19-L | 19 | 6_5 | cTaaTA | tggagatt | atatGAa | chr4 | 75865784 | Intron | PARM1 | 004- | GGAGG | 61.508 |
| | | | | | | CcaTC | aggatttc | TtTTTT | | | | | 075865654 | GGGCT | |
| | | | | | | TTTAC | aac (SEQ ID | TCAGA | | | | | | GTCTT | |
| | | | | | | CT | NO: 608) | (SEQ ID | | | | | | TCTGG | |
| | | | | | | (SEQ | | NO: 558) | | | | | | T (SEQ | |
| | | | | | | ID NO: | | | | | | | | ID NO: | |
| | | | | | | 459) | | | | | | | | 759) | |
| 39 | 5 | 2.97 | R-17-L | 17 | 6_5 | cTGCa | cctatctg | TGtAGg | chr8 | 110132747 | Intergenic | TRHR | 008- | CTCAG | 60.178 |
| | | | | | | AtTGT | cttgttgtt | tTCTTT | | | | | 110132588 | CCATG | |
| | | | | | | CTTTc | (SEQ ID | TTttGt | | | | | | TCAAG | |
| | | | | | | CtT | NO: | (SEQ ID | | | | | | CAAAT | |
| | | | | | | (SEQ | 609) | NO: | | | | | | CATTC | |
| | | | | | | ID NO: | | 559) | | | | | | AAGC | |
| | | | | | | 460) | | | | | | | | (SEQ ID | |
| | | | | | | | | | | | | | | NO: | |
| | | | | | | | | | | | | | | 760) | |
| 40 | 5 | 2.971 | L-13-R | 13 | 6 5 | TCTtA | gtttcaag | AGGTA | chr13 | 108402040 | Intron | FAM155A | 013- | ATGTT | 59.508 |
| | | | | | | AtcAG | gtcta | AAtAtA | | | | | 108401776 | CCAGG | |
| | | | | | | ACaCT | (SEQ ID | GTcGtA | | | | | | CGCCA | |
| | | | | | | aaA | NO: 610) | g (SEQ | | | | | | CGTAG | |
| | | | | | | (SEQ | | ID NO: | | | | | | (SEQ ID | |
| | | | | | | ID NO: | | 560) | | | | | | NO: | |
| | | | | | | 461) | | | | | | | | 761) | |
| 41 | 10 | 2.972 | R-18-L | 18 | 6_4 | ATGtT | acagtctc | TGgAG | chr5 | 129699260 | Intergenic | CHSY3 | 005- | CAACA | 60.178 |
| | | | | | | AtTaTC | ctcaaga | AtTtTTT | | | | | 129699152 | CAATT | |
| | | | | | | TTTAC | caa | TTCtat | | | | | | CAGCC | |
| | | | | | | Ca (SEQ | (SEQ ID | (SEQ ID | | | | | | ATGTT | |
| | | | | | | ID NO: | NO: | NO: | | | | | | CTTTG | |
| | | | | | | 462) | 611) | 561) | | | | | | TCCC | |
| | | | | | | | | | | | | | | (SEQ ID | |
| | | | | | | | | | | | | | | NO: | |
| | | | | | | | | | | | | | | 762) | |
| 42 | 5 | 2.973 | R-16-L | 16 | 6_5 | tTGacA | ctttctcct | TGCAGt | chr4 | 61094915 | Intergenic | LPHN3 | 004- | TAGGG | 61.508 |
| | | | | | | CccTC | agtagtc | GTCTaT | | | | | 061094798 | GGCAC | |
| | | | | | | TTTcC | (SEQ ID | TTttGc | | | | | | CTGTG | |
| | | | | | | CT (SEQ | NO: 612) | (SEQ ID | | | | | | CCAGT | |
| | | | | | | ID NO: | | NO: 562) | | | | | | T (SEQ | |
| | | | | | | 463) | | | | | | | | ID NO: | |
| | | | | | | | | | | | | | | 763) | |
| 43 | 17 | 2.974 | L-14-R | 14 | 6_3 | TCTcA | ctagctat | AaGTgc | chr10 | 59017381 | Intergenic | MIR3924 | 010- | GGCCA | 61.508 |
| | | | | | | AAAAG | caactc | tGtCAG | | | | | 059017278 | TCCCT | |
| | | | | | | ACTCa | (SEQ ID | TAGtAT | | | | | | CTACT | |
| | | | | | | GCc (SEQ | NO: 613) | (SEQ ID | | | | | | CCTGG | |
| | | | | | | ID NO: | | NO: 563) | | | | | | T (SEQ | |
| | | | | | | 464) | | | | | | | | ID NO: | |
| | | | | | | | | | | | | | | 764) | |
| 44 | 5 | 2.975 | L-18-R | 18 | 6_5 | aaTaA | aggtaag | AGaaAA | chr2 | 162041661 | Intron | TANK | 002- | GAAGA | 60.908 |
| | | | | | | AAActA | aaacaaa | AGAatG | | | | | 162041530 | TCAGT | |
| | | | | | | CTCTa | ttat | TAGtAT | | | | | | CACTT | |
| | | | | | | CA (SEQ | (SEQ ID | (SEQ ID | | | | | | GGCCT | |
| | | | | | | ID NO: | NO: | NO: 564) | | | | | | CTGG | |
| | | | | | | 465) | 614) | | | | | | | (SEQ ID | |
| | | | | | | | | | | | | | | NO: 765) | |
| 45 | 13 | 2.976 | L-10-R | 10 | 5_4 | TCTcA | tttatttcct | AGGTA | chr4 | 76823285 | Intron | PPEF2 | 004- | GGGCA | 61.508 |
| | | | | | | AAAca | (SEQ ID | AAaAC | | | | | 076823183 | GAATG | |
| | | | | | | ACTCT | NO: | AtaAGtg | | | | | | GTCAC | |
| | | | | | | GtA | 615) | T | | | | | | CCAGC | |
| | | | | | | (SEQ | | (SEQ | | | | | | A (SEQ | |
| | | | | | | ID NO: | | ID NO: | | | | | | ID NO: | |
| | | | | | | 466) | | 565) | | | | | | 766) | |
| 46 | 26 | 2.976 | R-19-L | 19 | 6_2 | ATGaa | tcttgataa | TGCAG | chr13 | 76308711 | Intron | LMO7 | 013- | GTGCA | 60.438 |
| | | | | | | AaTGT | gggtgttg | AGTgTT | | | | | 076308608 | TTCAG | |
| | | | | | | CaTTA | gt (SEQ | TcTCAG | | | | | | GAAGC | |
| | | | | | | aaT | ID NO: | A (SEQ | | | | | | TTCTG | |
| | | | | | | (SEQ | 616) | ID NO: | | | | | | TTTGA | |
| | | | | | | ID NO: | | 566) | | | | | | CC | |
| | | | | | | 467) | | | | | | | | (SEQ ID | |
| | | | | | | | | | | | | | | NO: | |
| | | | | | | | | | | | | | | 767) | |
| 47 | 8 | 2.977 | R-11-L | 11 | 5_5 | tTcCTt | tcacccct | TcaAGA | chr8 | 106290875 | Intergenic | ZFPM2 | 008- | GCAGG | 59.378 |
| | | | | | | CTcTC | aca | tTtTgTT | | | | | 106290748 | AAGTG | |
| | | | | | | TTTcC | (SEQ ID | TCAGA | | | | | | CCAGG | |
| | | | | | | CT (SEQ | NO: 617) | (SEQ ID | | | | | | ACATT | |
| | | | | | | ID NO: | | NO: 567) | | | | | | G (SEQ | |
| | | | | | | 468) | | | | | | | | ID NO: | |
| | | | | | | | | | | | | | | 768) | |
| 48 | 8 | 2.977 | R-16-L | 16 | 5_5 | tTaCTA | cctctggt | TGCAG | chr9 | 113113186 | Intergenic | TXNDC8 | 009- | GCTGG | 61.508 |
| | | | | | | aTGcC | cacaaca | AGaCT | | | | | 113113045 | AGGTG | |
| | | | | | | TTTtC | t (SEQ | TgTgC | | | | | | ATGGC | |
| | | | | | | CT | ID NO: | Gt (SEQ | | | | | | CAAGG | |
| | | | | | | (SEQ | 618) | ID NO: | | | | | | T (SEQ | |
| | | | | | | ID NO: | | 568) | | | | | | ID NO: | |
| | | | | | | 469) | | | | | | | | 769) | |
| 49 | 17 | 2.979 | R-20-L | 20 | 6_3 | ATcCT | ctcaaatc | TGCAG | chr13 | 103006085 | Intron | FGF14 | 013- | CCCAG | 61.508 |
| | | | | | | ACacT | tattctcca | AGTgTT | | | | | 103005959 | TACTC | |
| | | | | | | CTcgA | ccc (SEQ ID | TTTCct | | | | | | CCACA | |
| | | | | | | CCc | NO: | A (SEQ | | | | | | CTCTG | |
| | | | | | | (SEQ | 619) | ID NO: | | | | | | C (SEQ | |
| | | | | | | ID NO: | | 569) | | | | | | ID NO: | |
| | | | | | | 470) | | | | | | | | 770) | |
| 50 | 8 | 2.98 | L-11-R | 11 | 5_5 | ctTGcA | ttctgaac | AGGTg | chr9 | 83220345 | Intergenic | TLE4 | 009- | GTCCA | 61.088 |
| | | | | | | tAAaA | aaa | AAGAC | | | | | 083220145 | GGACA | |
| | | | | | | CTCTG | (SEQ ID | AGTttt | | | | | | AAGCT | |
| | | | | | | CA | NO: 620) | tT (SEQ | | | | | | CAGTA | |
| | | | | | | (SEQ | | ID NO: | | | | | | G | |
| | | | | | | ID NO: | | 570) | | | | | | CC | |
| | | | | | | 471) | | | | | | | | (SEQ ID | |
| | | | | | | | | | | | | | | NO: | |
| | | | | | | | | | | | | | | 771) | |

SIRT6-DdCBE

| | | | | | | | | | | | | | | | |
|---|---|---|---|---|---|---|---|---|---|---|---|---|---|---|---|
| 1 | 10 | 2.494 | R-11-L | 11 | 6_4 | aTTCA | tggcattct | GAgAG | chr1 | 112447620 | Intron | KCND3 | 001- | CAGCT | 61.508 |
| | | | | | | CGCC | ca (SEQ | ctCttCC | | | | | 112447519 | GGCCA | |
| | | | | | | GGAa | ID NO: | CCGTAc | | | | | | AGCAG | |
| | | | | | | GtCCa | 621) | (SEQ ID | | | | | | GGATC | |
| | | | | | | (SEQ | | NO: 672) | | | | | | A (SEQ | |
| | | | | | | ID NO: | | | | | | | | ID NO: | |
| | | | | | | 472) | | | | | | | | 772) | |
| 2 | 2 | 2.513 | L-19-R | 19 | 6_6 | acACa | gcatttctg | AGGatC | chr5 | 173100953 | Intergenic | BOD1 | 005- | GGGGG | 61.508 |
| | | | | | | gGGC | ccgtttag | TCtaGt | | | | | 173100857 | AGTCG | |
| | | | | | | GaaGC | aa (SEQ | GTGAA | | | | | | GACTT | |
| | | | | | | TGTC | ID NO: | g (SEQ | | | | | | AGAAG | |
| | | | | | | (SEQ | 622) | ID NO: | | | | | | G (SEQ | |
| | | | | | | ID NO: | | 673) | | | | | | ID NO: | |
| | | | | | | 473) | | | | | | | | 773) | |
| 3 | 13 | 2.546 | R-16-L | 16 | 5_4 | aTaCA | actggaa | GAaAa | chr10 | 6751406 | Intergenic | LOC100507127 | 010- | TGCTA | 59.508 |
| | | | | | | aGCC | gcaagag | CCCaG | | | | | 006751175 | GGCCC | |
| | | | | | | GGAG | gg (SEQ | CCGgG | | | | | | CGATT | |
| | | | | | | aGCCT | ID NO: | TAt | | | | | | TGTGG | |
| | | | | | | (SEQ | 623) | (SEQ ID | | | | | | (SEQ ID | |
| | | | | | | ID NO: | | NO: | | | | | | NO: | |
| | | | | | | 474) | | 674) | | | | | | 774) | |
| 4 | 2 | 2.62 | L-17-R | 17 | 6_6 | gTACa | gaggcgc | AGGCC | chrX | 69669589 | Exon | DLG3 | 00X- | GACCC | 60.908 |
| | | | | | | CaGCc | tgaagga | CTgtGG | | | | | 069669412 | TTCCA | |
| | | | | | | GGGC | ggc | tGcGAtt | | | | | | TTAGA | |
| | | | | | | gGTg | (SEQ ID | (SEQ ID | | | | | | TCTGA | |
| | | | | | | (SEQ | NO: 624) | NO: | | | | | | GGGC | |
| | | | | | | ID NO: | | 675) | | | | | | (SEQ ID | |
| | | | | | | 475) | | | | | | | | NO: 775) | |
| 5 | 10 | 2.627 | R-14-L | 14 | 6_4 | aTTCA | cgtgtgca | GgCAG | chr20 | 61295340 | Intron | LOC100127888 | 020- | GTGTA | 61.508 |
| | | | | | | CcCCC | gggaca | CCCCG | | | | | 061295138 | CCCCA | |
| | | | | | | cAGGG | (SEQ ID | aCGCac | | | | | | GAGAG | |
| | | | | | | CCT | NO: 625) | tg (SEQ | | | | | | AGCCG | |
| | | | | | | (SEQ | | ID NO: | | | | | | A (SEQ | |
| | | | | | | ID NO: | | 676) | | | | | | ID NO: | |
| | | | | | | 476) | | | | | | | | 776) | |
| 6 | 5 | 2.644 | L-19-R | 19 | 6_5 | TacCtC | atagtccc | AGGCt | chr7 | 142566992 | Intron | EPHB6 | 007- | CCTCA | 61.288 |
| | | | | | | aGCcG | tgaaagg | CTCCtG | | | | | 142566895 | GGTGA | |
| | | | | | | GGgTG | aggg | tGTGAt | | | | | | GAGCA | |
| | | | | | | TC (SEQ | (SEQ ID | g (SEQ | | | | | | CAGCC | |
| | | | | | | ID NO: | NO: 626) | ID NO: | | | | | | TT | |
| | | | | | | 477) | | 677) | | | | | | (SEQ ID | |
| | | | | | | | | | | | | | | NO: | |
| | | | | | | | | | | | | | | 777) | |
| 7 | 2 | 2.649 | L-10-R | 10 | 6_6 | cTcCc | cgtgtggc | AaGCCt | chr19 | 8456702 | Intron | RAB11B | 019- | GGATC | 61.508 |
| | | | | | | CacCt | ga (SEQ | TCCGG | | | | | 008456519 | CAAGG | |
| | | | | | | GGGC | ID NO: | gGgGAg | | | | | | TGCCT | |
| | | | | | | TGTC | 627) | g (SEQ | | | | | | TCACC | |
| | | | | | | (SEQ | | ID NO: | | | | | | C (SEQ | |
| | | | | | | ID NO: | | 678) | | | | | | ID NO: | |
| | | | | | | 478) | | | | | | | | 778) | |
| 8 | 17 | 2.65 | L-11-R | 11 | 6_3 | aTgCG | agtgaga | AaGCC | chr6 | 911829 | Intergenic | LOC285768 | 006- | GCTGG | 60.908 |
| | | | | | | CaGaG | aagt | CTCCa | | | | | 000911603 | ATTCG | |
| | | | | | | GaGCT | (SEQ ID | GCGTG | | | | | | ATCTG | |
| | | | | | | GTg | NO: 628) | AAg | | | | | | AGGTC | |
| | | | | | | (SEQ | | (SEQ ID | | | | | | AGCT | |
| | | | | | | ID NO: | | NO: 679) | | | | | | (SEQ ID | |
| | | | | | | 479) | | | | | | | | NO: 779) | |
| 9 | 2 | 2.662 | R-18-L | 18 | 6_6 | tTTCA | aatctgtta | GACAG | chr10 | 88121549 | Intron | GRID1 | 010- | CCCAG | 62.768 |
| | | | | | | CGCCc | aagctgtg | CttCtCC | | | | | 088121363 | GACAA | |
| | | | | | | aAtGG | t (SEQ | tttTAA | | | | | | AGTTG | |
| | | | | | | Caa | ID NO: | (SEQ ID | | | | | | CTTTG | |
| | | | | | | (SEQ | 629) | NO: | | | | | | GGGC | |
| | | | | | | ID NO: | | 680) | | | | | | (SEQ ID | |
| | | | | | | 480) | | | | | | | | NO: | |
| | | | | | | | | | | | | | | 780) | |
| 10 | 2 | 2.671 | L-17-R | 17 | 6_6 | TTCCG | ttgttgtgg | AGGtgt | chr5 | 2112252 | Intergenic | IRX4 | 005- | GCCTC | 61.508 |
| | | | | | | CcGCG | gagaaca | TCtGGC | | | | | 002112000 | GCCAA | |
| | | | | | | GaGaT | a (SEQ | tTGAgC | | | | | | GAAAC | |
| | | | | | | taC | ID NO: | (SEQ ID | | | | | | GCCCA | |
| | | | | | | (SEQ | 630) | NO: 681) | | | | | | T (SEQ | |
| | | | | | | ID NO: | | | | | | | | ID NO: | |
| | | | | | | 481) | | | | | | | | 781) | |
| 11 | 8 | 2.673 | L-18-R | 18 | 5 5 | aaACG | gatgacgt | AGGCC | chr2 | 2737282 | Intron | TCF23 | 002- | CCAGC | 61.088 |
| | | | | | | CGGC | aggtggg | CTCtGG | | | | | 027372656 | ACACC | |
| | | | | | | aGGG | cag | tGcctAC | | | | | | CTGAT | |
| | | | | | | CTGca | (SEQ ID | (SEQ ID | | | | | | AAGCA | |
| | | | | | | (SEQ | NO: | NO: 682) | | | | | | GGA | |
| | | | | | | ID NO: | 631) | | | | | | | (SEQ ID | |
| | | | | | | 482) | | | | | | | | NO: 782) | |
| 12 | 2 | 2.675 | L-15-R | 15 | 6_6 | TTcCtC | cagggca | AGGgg | chr2 | 27421788 | Intergenic | SLC5A6 | 002- | CCAGG | 60.908 |
| | | | | | | caCaG | gaggtga | CTggG | | | | | 027421674 | GCAAC | |
| | | | | | | GGCT | a (SEQ | GtGTGA | | | | | | AGGTT | |
| | | | | | | GgC (SEQ | ID NO: | cC | | | | | | TAAGA | |
| | | | | | | ID NO: | 632) | (SEQ ID | | | | | | CCCA | |
| | | | | | | 483) | | NO: 683) | | | | | | (SEQ ID | |
| | | | | | | | | | | | | | | NO: 783) | |
| 13 | 5 | 2.68 | R-10-L | 10 | 6 5 | GcTCA | cctttgcct | GACAG | chr17 | 18188907 | Intron | TOP3A | 017- | GGTCT | 61.508 |
| | | | | | | CcCCGg | g (SEQ | CCtatgC | | | | | 018188800 | CGATG | |
| | | | | | | GAatcC | ID NO: | agGTAA | | | | | | TGCTC | |
| | | | | | | CT (SEQ | 633) | (SEQ ID | | | | | | CGCAT | |
| | | | | | | ID NO: | | NO: 684) | | | | | | G (SEQ | |
| | | | | | | 484) | | | | | | | | ID NO: | |
| | | | | | | | | | | | | | | 784) | |
| 14 | 5 | 2.68 | R-11-L | 11 | 6_5 | GTTCt | cattctctt | GACAG | chr16 | 13033690 | Intron | SHISA9 | 016- | CCATC | 61.508 |
| | | | | | | CtCCG | ga (SEQ | CaatGCt | | | | | 013033556 | ACCTG | |
| | | | | | | cAGaa | ID NO: | GaGaA | | | | | | CCTCT | |
| | | | | | | CCT (SEQ | 634) | A (SEQ | | | | | | CCCTG | |
| | | | | | | ID NO: | | ID NO: | | | | | | T (SEQ | |
| | | | | | | 485) | | 685) | | | | | | ID NO: | |
| | | | | | | | | | | | | | | 785) | |
| 15 | 5 | 2.684 | L-19-R | 19 | 6 5 | TTAtGa | aggaact | AGGCC | chr5 | 52333431 | Intron | ITGA2 | 005- | CTTGG | 61.088 |
| | | | | | | GGgtG | aggatttc | tTagGGt | | | | | 052333300 | TGTGT | |
| | | | | | | aGtTG | accg | GTGAAt | | | | | | CTCTT | |
| | | | | | | TC (SEQ | (SEQ ID | (SEQ ID | | | | | | CCTGC | |
| | | | | | | ID NO: | NO: | NO: 686) | | | | | | ACG | |
| | | | | | | 486) | 635) | | | | | | | (SEQ ID | |
| | | | | | | | | | | | | | | NO: 786) | |
| 16 | 2 | 2.688 | L-11-R | 11 | 6_6 | TcACc | atgcactt | AGGgag | chr20 | 20629814 | Intron | RALGAPA2 | 020- | GGTAA | 61.288 |
| | | | | | | CaGCc | ctg | TCCtGt | | | | | 020629697 | AAGCA | |
| | | | | | | tGGCT | (SEQ ID | GTGAA | | | | | | CCCTG | |
| | | | | | | GTg | NO: 636) | g (SEQ | | | | | | AGAGG | |
| | | | | | | (SEQ | | ID NO: | | | | | | GC | |
| | | | | | | ID NO: | | 687) | | | | | | (SEQ ID | |
| | | | | | | 487) | | | | | | | | NO: | |
| | | | | | | | | | | | | | | 787) | |
| 17 | 5 | 2.689 | L-13-R | 13 | 6_5 | cTcaG | tttacatag | tGGCtC | chr22 | 50573100 | Intron | MOV10L1 | 022- | CAGTC | 59.508 |
| | | | | | | CGaC | gggg | agCGG | | | | | 050572985 | TCCAC | |
| | | | | | | GtGGC | (SEQ ID | CGTGA | | | | | | AAGTG | |
| | | | | | | TGTC | NO: 637) | ct (SEQ | | | | | | ACGGG | |
| | | | | | | (SEQ | | ID NO: | | | | | | (SEQ ID | |
| | | | | | | ID NO: | | 688) | | | | | | NO: | |
| | | | | | | 488) | | | | | | | | 788) | |
| 18 | 5 | 2.691 | R-13-L | 13 | 6_5 | acTCc | cgttccca | GcCAG | chr20 | 2777030 | Exon | CPXM1 | 020- | AGGGC | 61.508 |
| | | | | | | CGCCc | tgcat | CCaCGt | | | | | 002776931 | AGCAG | |
| | | | | | | cAGGG | (SEQ ID | aGCGc | | | | | | GTGAA | |
| | | | | | | CCT | NO: 638) | Ac (SEQ | | | | | | TGCGC | |
| | | | | | | (SEQ | | ID NO: | | | | | | A (SEQ | |
| | | | | | | ID NO: | | 689) | | | | | | ID NO: | |
| | | | | | | 489) | | | | | | | | 789) | |
| 19 | 5 | 2.692 | L-19-R | 19 | 6_5 | gaAgG | acctgtcc | AGGCt | chr14 | 40674202 | Intergenic | FBXO33 | 014- | GGCCC | 61.508 |
| | | | | | | gGGC | cagtctcc | CTgtGG | | | | | 040674014 | TGGCT | |
| | | | | | | GGGG | tgc (SEQ ID | CaTGA | | | | | | TGGCC | |
| | | | | | | CTtcC | NO: 639) | Aa | | | | | | TTAACT | |
| | | | | | | (SEQ | | (SEQ ID | | | | | | (SEQ ID | |
| | | | | | | ID NO: | | NO: | | | | | | NO: | |
| | | | | | | 490) | | 690) | | | | | | 790) | |
| 20 | 5 | 2.693 | R-16-L | 16 | 6_5 | CTTCc | ctccgtgtt | GACAGt | chr17 | 4273323 | Intergenic | UBE2G1 | 017- | GCCAC | 61.508 |
| | | | | | | CaCCa | cccgtgg | CtCGC | | | | | 004273151 | TCCCC | |
| | | | | | | GctGG | (SEQ ID | CaCccA | | | | | | TTTGG | |
| | | | | | | CCT | NO: 640) | A (SEQ | | | | | | TGCTG | |
| | | | | | | (SEQ | | ID NO: | | | | | | T (SEQ | |
| | | | | | | ID NO: | | 691) | | | | | | ID NO: | |
| | | | | | | 491) | | | | | | | | 791) | |
| 21 | 10 | 2.696 | R-14-L | 14 | 6_4 | GTagg | ggcggca | GACAG | chr6 | 157557363 | Intergenic | ARID1B | 006- | CCAGG | 61.288 |
| | | | | | | CGCC | gggaccc | CtCtGC | | | | | 157557252 | AGAAG | |
| | | | | | | GGcG | (SEQ ID | CGCGg | | | | | | AAGTG | |
| | | | | | | GagCT | NO: | Ac (SEQ | | | | | | GCATC | |
| | | | | | | (SEQ | 641) | ID NO: | | | | | | CG | |
| | | | | | | ID NO: | | 692) | | | | | | (SEQ ID | |
| | | | | | | 492) | | | | | | | | NO: 792) | |
| 22 | 2 | 2.7 | R-14-L | 14 | 6_6 | tTTCA | gtttagag | aACAG | chr6 | 12344255 | Intergenic | EDN1 | 006- | CCTTT | 61.508 |
| | | | | | | CaCaG | caaata | CCCatt | | | | | 012344151 | GCAAT | |
| | | | | | | GctGtC | (SEQ ID | CGtGTA | | | | | | GGAGG | |
| | | | | | | CT | NO: 642) | t (SEQ | | | | | | GCAGG | |
| | | | | | | (SEQ | | ID NO: | | | | | | G (SEQ | |
| | | | | | | ID NO: | | 693) | | | | | | ID NO: | |
| | | | | | | 493) | | | | | | | | 793) | |
| 23 | 5 | 2.701 | R-10-L | 10 | 6_5 | GgTCA | ctgaagg | CACAG | chr5 | 28950449 | Intergenic | LSP1P3 | 005- | CAGGC | 59.148 |
| | | | | | | CGCa | agc | CtCtGC | | | | | 028950211 | CTAAG | |
| | | | | | | GaAG | (SEQ ID | aGtGTA | | | | | | CCTTG | |
| | | | | | | GGtCc | NO: | t (SEQ | | | | | | ATAGA | |
| | | | | | | (SEQ | 643) | ID NO: | | | | | | CAG | |
| | | | | | | ID NO: | | 694) | | | | | | (SEQ ID | |
| | | | | | | 494) | | | | | | | | NO: 794) | |
| 24 | 2 | 2.704 | R-14-L | 14 | 6_6 | cTaCA | ccgcagc | GAgAa | chr15 | 91565756 | Exon | VPS33B | 015- | CAAGA | 60.908 |
| | | | | | | CcCCG | gtacgag | CCCCG | | | | | 091565655 | GAGCT | |
| | | | | | | CAGaG | (SEQ ID | CCttcTA | | | | | | ACTAC | |
| | | | | | | aCT | NO: 644) | c (SEQ | | | | | | CTCGG | |
| | | | | | | (SEQ | | ID NO: | | | | | | AGCA | |
| | | | | | | ID NO: | | 695) | | | | | | (SEQ ID | |
| | | | | | | 495) | | | | | | | | NO: 795) | |
| 25 | 2 | 2.712 | R-17-L | 17 | 6_6 | aTTCct | cgctgctg | GAtAGt | chr14 | 65346678 | Intergenic | CHURC1- | 014- | CTCAC | 61.508 |
| | | | | | | GCCG | ccgggac | CCCGC | | | | FNTB | 065346505 | CTGCC | |
| | | | | | | GgGGa | ca (SEQ | gGCGg | | | | | | CTGGG | |
| | | | | | | CaT | ID NO: | gg (SEQ | | | | | | ACTGA | |
| | | | | | | (SEQ | 645) | ID NO: | | | | | | A (SEQ | |
| | | | | | | ID NO: | | 696) | | | | | | ID NO: | |
| | | | | | | 496) | | | | | | | | 796) | |
| 26 | 5 | 2.712 | R-12-L | 12 | 6_5 | cTTCc | gagcctg | GAtAGC | chr6 | 44022923 | Intergenic | C6orf223 | 006- | ACAAC | 61.508 |
| | | | | | | CGCCa | actca | CCaGC | | | | | 044022749 | TCCTG | |
| | | | | | | GAGta | (SEQ ID | CcCagA | | | | | | GGGGG | |
| | | | | | | CCa | NO: 646) | A (SEQ | | | | | | TCCAG | |
| | | | | | | (SEQ | | ID NO: | | | | | | A (SEQ | |
| | | | | | | ID NO: | | 697) | | | | | | ID NO: | |
| | | | | | | 497) | | | | | | | | 797) | |
| 27 | 2 | 2.714 | R-13-L | 13 | 6_6 | tTTCcC | acacctgt | GcCtGC | chr4 | 110690930 | Intron | CFI | 004- | GCTGG | 61.288 |
| | | | | | | tCCtGA | ctgtt | CCtGCt | | | | | 110690821 | CTGCT | |
| | | | | | | GGaC | (SEQ ID | GCcTAc | | | | | | CATGG | |
| | | | | | | Cc | NO: 647) | (SEQ ID | | | | | | TCCAT | |
| | | | | | | (SEQ | | NO: 698) | | | | | | GT | |
| | | | | | | ID NO: | | | | | | | | (SEQ ID | |
| | | | | | | 498) | | | | | | | | NO: | |
| | | | | | | | | | | | | | | 798) | |
| 28 | 2 | 2.715 | R-18-L | 18 | 6_6 | cTcCA | tgcttgcat | GcCAG | chr8 | 41136137 | Intron | SFRP1 | 008- | CCCTG | 61.508 |
| | | | | | | CcCCc | gtgcccg | CCCtG | | | | | 041136008 | CCTGC | |
| | | | | | | agGGG | ag (SEQ | CaGgGc | | | | | | AATGG | |
| | | | | | | CCT | ID NO: | Ag | | | | | | TGAGC | |
| | | | | | | (SEQ | 648) | (SEQ ID | | | | | | T (SEQ | |
| | | | | | | ID NO: | | NO: 699) | | | | | | ID NO: | |
| | | | | | | 499) | | | | | | | | 799) | |
| 29 | 2 | 2.717 | L-16-R | 16 | 6_6 | TTAtaC | gctggcat | tGcCCC | chr4 | 112085926 | Intergenic | PITX2 | 004- | CTGTG | 61.288 |
| | | | | | | aGCaG | ctggcag | TCtGGg | | | | | 112085748 | GGTGC | |
| | | | | | | aGCTG | g (SEQ | aTGAAg | | | | | | AGCTT | |
| | | | | | | Tg | ID NO: | (SEQ ID | | | | | | CAGCA | |
| | | | | | | (SEQ | 649) | NO: | | | | | | GA | |
| | | | | | | ID NO: | | 700) | | | | | | (SEQ ID | |
| | | | | | | 500) | | | | | | | | NO: 800) | |
| 30 | 2 | 2.718 | R-17-L | 17 | 6_6 | GcaCA | aggcaca | GAgAcg | chr2 | 202897610 | Intergenic | FZD7 | 002- | GCGCC | 61.508 |
| | | | | | | CGCC | cggggcc | CCCGg | | | | | 202897403 | TGGCT | |
| | | | | | | GcAGa | act | CGCGT | | | | | | CAAGA | |
| | | | | | | aCCa | (SEQ ID | cg (SEQ | | | | | | CGAAG | |
| | | | | | | (SEQ | NO: 650) | ID NO: | | | | | | A (SEQ | |
| | | | | | | ID NO: | | 701) | | | | | | ID NO: | |
| | | | | | | 501) | | | | | | | | 801) | |
| 31 | 5 | 2.718 | L-10-R | 10 | 6_5 | TcACG | caggtagt | AGGgC | chr17 | 18864117 | Intron | SLC5A10 | 017- | TCTGT | 61.508 |
| | | | | | | CaGC | cc (SEQ | CcCCG | | | | | 018864014 | GGGCC | |
| | | | | | | GaGtC | ID NO: | GgGTGt | | | | | | CCTCA | |
| | | | | | | TGga | 651) | Ag | | | | | | AGAGG | |
| | | | | | | (SEQ | | (SEQ ID | | | | | | A (SEQ | |
| | | | | | | ID NO: | | NO: 702) | | | | | | ID NO: | |
| | | | | | | 502) | | | | | | | | 802) | |
| 32 | 5 | 2.719 | L-16-R | 16 | 6_5 | cTACc | catgtact | AGGaC | chr9 | 111625199 | Exon | ACTL7A | 009- | CGGTC | 61.508 |
| | | | | | | aGtCG | cctatgga | CTCCG | | | | | 111625099 | TTGGT | |
| | | | | | | cGcCT | (SEQ ID | GCcTG | | | | | | TTCAG | |
| | | | | | | GTC | NO: 652) | gtg | | | | | | ACCCG | |
| | | | | | | (SEQ | | (SEQ ID | | | | | | C (SEQ | |
| | | | | | | ID NO: | | NO: | | | | | | ID NO: | |
| | | | | | | 503) | | 703) | | | | | | 803) | |
| 33 | 2 | 2.72 | R-17-L | 17 | 6_6 | caTCA | actccact | tACAGC | chr17 | 34250712 | Intron | RDM1 | 017- | CCGAG | 61.288 |
| | | | | | | CcCCc | ccattagc | CCtGC | | | | | 034250614 | ATCAC | |
| | | | | | | GgGaGc | (SEQ | CtCtgAc | | | | | | GCCAG | |
| | | | | | | CCT | ID NO: | (SEQ ID | | | | | | TGCAC | |
| | | | | | | (SEQ | 653) | NO: | | | | | | TT | |
| | | | | | | ID NO: | | 704) | | | | | | (SEQ ID | |
| | | | | | | 504) | | | | | | | | NO: 804) | |
| 34 | 2 | 2.722 | L-13-R | 13 | 6_6 | aTcCa | ctcttgac | AGaCtg | chr1 | 177992803 | Intron | LOC730102 | 001- | GGGGA | 61.508 |
| | | | | | | CaGCt | cttgc | gCaGG | | | | | 177992627 | AGGGG | |
| | | | | | | GGGC | (SEQ ID | aGTGA | | | | | | AAAGA | |
| | | | | | | aGTC | NO: 654) | AC | | | | | | GGCAG | |
| | | | | | | (SEQ | | (SEQ ID | | | | | | T (SEQ | |
| | | | | | | ID NO: | | NO: | | | | | | ID NO: | |
| | | | | | | 505) | | 705) | | | | | | 805) | |
| 35 | 2 | 2.726 | L-15-R | 15 | 6_6 | gTACc | ccctccttc | AGGga | chr3 | 185419730 | Intron | IGF2BP2 | 003- | GCTGG | 61.508 |
| | | | | | | CaGga | cccggg | CTCtGG | | | | | 185419507 | ACTGT | |
| | | | | | | GGcCT | (SEQ ID | CaTGtc | | | | | | CGCAC | |
| | | | | | | GTC | NO: 655) | C (SEQ | | | | | | CTCTG | |
| | | | | | | (SEQ | | ID NO: | | | | | | A (SEQ | |
| | | | | | | ID NO: | | 706) | | | | | | ID NO: | |
| | | | | | | 506) | | | | | | | | 806) | |
| 36 | 2 | 2.727 | R-15-L | 15 | 6_6 | tgaCAa | cctgtcga | GtCAG | chr19 | 5712298 | Intron | LONP1 | 019- | GTCCC | 61.508 |
| | | | | | | GCCcc | aaacggt | CCtgGC | | | | | 005712198 | CTCCA | |
| | | | | | | AGGG | (SEQ ID | CGgGc | | | | | | CCCCT | |
| | | | | | | CCT | NO: 656) | Ac (SEQ | | | | | | TAGAC | |
| | | | | | | (SEQ | | ID NO: | | | | | | T (SEQ | |
| | | | | | | ID NO: | | 707) | | | | | | ID NO: | |
| | | | | | | 507) | | | | | | | | 807) | |
| 37 | 5 | 2.727 | L-18-R | 18 | 6_5 | TTACa | attagggt | AGGCa | chr2 | 134742851 | Intergenic | MIR3679 | 002- | CCTTC | 59.148 |
| | | | | | | gGGCa | gaggaga | CTCaG | | | | | 134742567 | CTCTG | |
| | | | | | | GGaCT | gca | GCGca | | | | | | TGGTG | |
| | | | | | | agC | (SEQ ID | AAa | | | | | | TGACT | |
| | | | | | | (SEQ | NO: | (SEQ ID | | | | | | TTC | |
| | | | | | | ID NO: | 657) | NO: 708) | | | | | | (SEQ ID | |
| | | | | | | 508) | | | | | | | | NO: 808) | |
| 38 | 2 | 2.729 | L-15-R | 15 | 6_6 | ccAgG | cgtctgatt | gGaCtC | chr4 | 1299150 | Intron | MAEA | 004- | GGAGC | 61.288 |
| | | | | | | CGGC | gctgga | TtCGGt | | | | | 001299047 | AAGTG | |
| | | | | | | GcGG | (SEQ ID | GTGgA | | | | | | GTCCC | |
| | | | | | | CccTC | NO: 658) | C (SEQ | | | | | | TGTGG | |
| | | | | | | (SEQ | | ID NO: | | | | | | AA | |
| | | | | | | ID NO: | | 709) | | | | | | (SEQ ID | |
| | | | | | | 509) | | | | | | | | NO: 809) | |
| 39 | 2 | 2.734 | L-20-R | 20 | 6_6 | TTAgG | gaatcata | AGGgC | chr5 | 23747047 | Intergenic | PRDM9 | 005- | GGGAA | 59.378 |
| | | | | | | gaaCa | gcagaca | CTCtaG | | | | | 023746858 | TGCTG | |
| | | | | | | GGGC | gcaac | tGTGcA | | | | | | GCACT | |
| | | | | | | TGTt | (SEQ ID | a (SEQ | | | | | | GTCTA | |
| | | | | | | (SEQ | NO: 659) | ID NO: | | | | | | G (SEQ | |
| | | | | | | ID NO: | | 710) | | | | | | ID NO: | |
| | | | | | | 510) | | | | | | | | 810) | |
| 40 | 2 | 2.735 | L-16-R | 16 | 6_6 | aTACG | ggtggcc | AGGaC | chr11 | 67399253 | Exon | TBX10 | 011- | GGGCT | 61.508 |
| | | | | | | tGaCa | ggggcca | CTCaG | | | | | 067399064 | TCTGG | |
| | | | | | | GGcCT | gc | GtGgGg | | | | | | CATCA | |
| | | | | | | GTa | (SEQ | gC | | | | | | CTGGG | |
| | | | | | | (SEQ | ID NO: | (SEQ ID | | | | | | A (SEQ | |
| | | | | | | ID NO: | 660) | NO: 711) | | | | | | ID NO: | |
| | | | | | | 511) | | | | | | | | 811) | |
| 41 | 10 | 2.739 | R-10-L | 10 | 6_4 | GTgCt | gaaaatct | GcCAG | chr20 | 44452703 | Exon | TNNC2 | 020- | CGCTC | 61.508 |
| | | | | | | CcCCG | ca | CtCCtC | | | | | 044452600 | TTCCC | |
| | | | | | | GAGGc | (SEQ | CGgGT | | | | | | AAGCT | |
| | | | | | | CCT | ID NO: | cg (SEQ | | | | | | CCCGT | |
| | | | | | | (SEQ | 661) | ID NO: | | | | | | T (SEQ | |
| | | | | | | ID NO: | | 712) | | | | | | ID NO: | |
| | | | | | | 512) | | | | | | | | 812) | |
| 42 | 10 | 2.743 | L-14-R | 14 | 6_4 | TgACc | gcacctg | AGGCC | chr17 | 8013212 | Exon | ALOXE3 | 017- | GGTGT | 63.028 |
| | | | | | | CGGC | gtccacg | CTCgG | | | | | 008013113 | TCTCA | |
| | | | | | | aGGGa | (SEQ ID | GgtTGA | | | | | | CACCC | |
| | | | | | | gGcC | NO: 662) | gC | | | | | | CAGGT | |
| | | | | | | (SEQ | | (SEQ ID | | | | | | GTC | |
| | | | | | | ID NO: | | NO: 713) | | | | | | (SEQ ID | |
| | | | | | | 513) | | | | | | | | NO: | |
| | | | | | | | | | | | | | | 813) | |
| 43 | 5 | 2.744 | L-13-R | 13 | 6_5 | gggaG | agctccg | gGGCg | chr19 | 4969006 | Promoter | KDM4B | No | No | No |
| | | | | | | gGGC | gccaat | CTCgG | | | | | Primers | Primers | Primers |
| | | | | | | GGaG | (SEQ ID | GCGTG | | | | | | | |
| | | | | | | CTGTC | NO: | gAt | | | | | | | |
| | | | | | | (SEQ | 663) | (SEQ ID | | | | | | | |
| | | | | | | ID NO: | | NO: 714) | | | | | | | |
| | | | | | | 514) | | | | | | | | | |
| 44 | 2 | 2.748 | L-11-R | 11 | 6_6 | TgACa | ggcagca | AGGtaC | chr18 | 71825292 | Exon | TIMM21 | 018- | TGGCC | 61.288 |
| | | | | | | aGGC | tgtc | TgtGGC | | | | | 071825081 | TCCCA | |
| | | | | | | GGGGt | (SEQ ID | tTGAAt | | | | | | GATTG | |
| | | | | | | cGcC | NO: 664) | (SEQ ID | | | | | | CTGGG | |
| | | | | | | (SEQ | | NO: 715) | | | | | | AT | |
| | | | | | | ID NO: | | | | | | | | (SEQ ID | |
| | | | | | | 515) | | | | | | | | NO: | |
| | | | | | | | | | | | | | | 814) | |
| 45 | 5 | 2.749 | R-20-L | 20 | 6_5 | GTcCA | tggggca | GACAG | chr14 | 77161783 | Intergenic | VASH1 | 014- | GCTTG | 61.508 |
| | | | | | | gGCtG | ctggcag | CCgCtC | | | | | 077161687 | GAGCT | |
| | | | | | | cAGaG | cagtga | tGtGTg | | | | | | GGGCC | |
| | | | | | | CCa | (SEQ ID | A (SEQ | | | | | | ATCAG | |
| | | | | | | (SEQ | NO: | ID NO: | | | | | | A (SEQ | |
| | | | | | | ID NO: | 665) | 716) | | | | | | ID NO: | |
| | | | | | | 516) | | | | | | | | 815) | |
| 46 | 2 | 2.749 | R-18-L | 18 | 6_6 | GTTCt | gggcctg | GcCAGt | chr16 | 28022533 | Intron | GSG1L | 016- | CTGTA | 61.288 |
| | | | | | | CagCa | gcctggtc | CCtGC | | | | | 028022390 | CACAC | |
| | | | | | | aAGaG | ctt (SEQ | CtCaTg | | | | | | GCCCA | |
| | | | | | | CCT | ID NO: | A (SEQ | | | | | | GATGG | |
| | | | | | | (SEQ | 666) | ID NO: | | | | | | CT | |
| | | | | | | ID NO: | | 717) | | | | | | (SEQ ID | |
| | | | | | | 517) | | | | | | | | NO: 816) | |
| 47 | 5 | 2.752 | L-14-R | 14 | 6_5 | TcACct | tcatgagc | tGGCCg | chr1 | 40236360 | Exon | OXCT2 | 001- | GCTTC | 60.908 |
| | | | | | | ctCGG | gccagg | TCCGG | | | | | 040236250 | TCCTG | |
| | | | | | | GGCT | (SEQ ID | gGTGtA | | | | | | AAGAC | |
| | | | | | | GgC | NO: 667) | g (SEQ | | | | | | CACGT | |
| | | | | | | (SEQ | | ID NO: | | | | | | TTCC | |
| | | | | | | ID NO: | | 718) | | | | | | (SEQ ID | |
| | | | | | | 518) | | | | | | | | NO: 817) | |
| 48 | 5 | 2.752 | R-14-L | 14 | 6_5 | cTaCA | cctggcg | GcCAG | chr1 | 39981146 | Intron | BMP8A | 001- | TGTTC | 62.768 |
| | | | | | | CcCCG | ctcatga | CCCCG | | | | | 039980964 | CTACG | |
| | | | | | | GAcGG | (SEQ ID | agagGT | | | | | | TGGGC | |
| | | | | | | CCa | NO: 668) | gA | | | | | | GAGAA | |
| | | | | | | (SEQ | | (SEQ ID | | | | | | CACC | |
| | | | | | | ID NO: | | NO: 719) | | | | | | (SEQ ID | |
| | | | | | | 519) | | | | | | | | NO: | |
| | | | | | | | | | | | | | | 818) | |
| 49 | 5 | 2.753 | R-20-L | 20 | 6_5 | GTgCct | ggtgcgg | GACgG | chr20 | 56328503 | Intergenic | PMEPA1 | 020- | CTGTT | 61.088 |
| | | | | | | cCtGcA | acccagt | CtCtGCt | | | | | 056328249 | TTCCA | |
| | | | | | | GGGC | gctcca | GaGTA | | | | | | CAGTG | |
| | | | | | | CT (SEQ | (SEQ ID | A (SEQ | | | | | | GCCGA | |
| | | | | | | ID NO: | NO: 669) | ID NO: | | | | | | ACC | |
| | | | | | | 520) | | 720) | | | | | | (SEQ ID | |
| | | | | | | | | | | | | | | NO: 819) | |
| 50 | 2 | 2.754 | L-15-R | 15 | 6_6 | CTACG | gaggctct | ctGCCa | chr15 | 42706924 | Exon | ZFP106 | 015- | CTGCA | 61.088 |
| | | | | | | CcGCa | cagcaca | gCCaG | | | | | 042706718 | CACTT | |
| | | | | | | GaGCa | (SEQ ID | CGTGA | | | | | | GCACA | |
| | | | | | | tTC | NO: 670) | Aa | | | | | | CACAC | |
| | | | | | | (SEQ | | (SEQ ID | | | | | | AGG | |
| | | | | | | ID NO: | | NO: | | | | | | (SEQ ID | |
| | | | | | | 521) | | 721) | | | | | | NO: | |
| | | | | | | | | | | | | | | 820) | |

| | | Reverse | Expected | | | |
|---|---|---|---|---|---|---|
| | Reverse | Melt | Product | Digestion | Digestion | |
| Ranking | Primer | Temp | Size | Size1 | Size2 | Amplicon Sequence |
| JAK2-DdCBE | | | | | | |
| 1 | CTCCA | 61.508 | 406 | 262 | 144 | GTGTGGTCAGGACAAACTGTTCCCTGAAC |
| | GCCTG | | | | | TTAAAAGGTGAAGGACAAGACCCCATATT |
| | GGCGA | | | | | ATTATCCTGTATTAAAAAAGGAAATATACA |
| | CTGAA | | | | | TATATGTACACAGACACCCCATATCACAG |
| | T (SEQ | | | | | ACAAGAAACTTCCCATAATTCAAAGGGAG |
| | ID NO: | | | | | ACCATTTCCTTATTAGCAAAGGTGCGCAT |
| | 821) | | | | | TACAGTATTTCATGACAGTTAAAAATTACA |
| | | | | | | CACCTACCACCTGTTTTGGTCAATCTTGC |
| | | | | | | TAAAAAAGACACTGAAATAGACAATTTTCT |
| | | | | | | TCTTTAAGGTAAAGACAATGTCTAATTTAG |
| | | | | | | AAAATCTTCCTCTTGAGATTGCACAGTGA |
| | | | | | | AAGGTATCAGTTAATTAAATATAAAAGCTT |
| | | | | | | ACCGTTTTTGTTTTTTTTTGAGACAGAGTT |
| | | | | | | TTATTCAGTCGCCCAGGCTGGAG (SEQ ID |
| | | | | | | NO: 320) |
| 2 | CCACT | 59.148 | 332 | 205 | 127 | GGGGCTGGGAGAAGAGAGGAATGGGAG |
| | GATAA | | | | | TTATTGATAATGGGTACAGTTTCAGTTTGA |
| | CCTAT | | | | | AAAGATGAAAAATTCTGAAGATGGATGGT |
| | GCCCA | | | | | GGTAGTGATTATACAACAATGTGAATATAC |
| | GGA | | | | | TTAATGCTGCTGAACTATACAGTTTAAAAT |
| | (SEQ ID | | | | | GGTTAAATGGTACATTTTATGTATACGTTA |
| | NO: 822) | | | | | CCATAAAAAAAAAAGTCTGGACTATAATGT |
| | | | | | | TAGAAGTAAAGATAGTAGTAATCTTATAGG |
| | | | | | | AGAAAGAAGAGGATGGTGTTCAGAAAGA |
| | | | | | | GCGTGGTGAGGGTGGGGAACTTCAAGG |
| | | | | | | GTGCTGGCAATATTCTATTCCTGGGCATA |
| | | | | | | GGTTATCAGTGG (SEQ ID NO: 321) |
| 3 | CTATG | 61.548 | 377 | 242 | 135 | GTCCACTCTGTGTTACCCAGATCTTGTAC |
| | GAGAC | | | | | AGGAAATGGAGTGTATTTAATATTGATGA |
| | TCCTT | | | | | CTCTGTATGTGTCATTTAATTGTCTCTATT |
| | CAGGT | | | | | GATTGGATTTCATCAGAGTGTGGGGCTTG |
| | CTTTTT | | | | | GACAGAGCTTTGATTAGACTGTAAGGATT |
| | TCCC | | | | | CTTTGCCGTTTTCTTTTTTCCGACACCATA |
| | (SEQ ID | | | | | TCAATGTACCTTCTGGTGTGATATCACTTT |
| | NO: | | | | | CACAATCAATATCTGAAAAAAGCTCTGCA |
| | 823) | | | | | CACAGGCCTGCAGGAAAAGAGAGAAGGC |
| | | | | | | ACTGCCTCTAAGTCCCCTTATACACATAG |
| | | | | | | ATTTAACCTCTCCAATTGAAAAAGGTTTAT |
| | | | | | | TGCATGTTTTAGAGCAGGATGGAGTGGG |
| | | | | | | AAAAAAGACCTGAAGGAGTCTCCATAG |
| | | | | | | (SEQ ID NO: 322) |
| 4 | GAGTG | 61.288 | 411 | 252 | 159 | GCCGGTTTAGGTATGGGAACCACACAAC |
| | AGACC | | | | | CTCTAAAGTGAAGGAGGCTTCTCCAGCAA |
| | CTGTC | | | | | AACCGAACGGCATATTCAGATGCTGGGT |
| | TTGGG | | | | | GAGGATTCATAATATTTAGCTATTTTGTTA |
| | GA | | | | | ATTAATATAACAGTAATTTCTTTATTCAGTC |
| | (SEQ ID | | | | | ACAGAAACATCAATGTATCTATGCTGAAG |
| | NO: 824) | | | | | CACCATAATTTTATAAGCACAGTTATTGGG |
| | | | | | | GGAAAATGTTACCTTTTTGTCCTAAAAAGA |
| | | | | | | CTCTCCACGCATGTAGCTAGGGAAAGCTA |
| | | | | | | AGGTCAGTGGCAGAGTTATATGCACACCT |
| | | | | | | CCACCACCAACATCACCACCACCACCTCC |
| | | | | | | TCCTTCATCTCTCATCCAGCTCTGCCTTA |
| | | | | | | GGCCCTTTTTTTTCTTTTCTTTTCTTTTCTT |
| | | | | | | TTTTTTTTCCCCAAGACAGGGTCTCACTC |
| | | | | | | (SEQ ID NO: 323) |
| 5 | CCTAT | 59.148 | 458 | 298 | 160 | TTACCCCTGGATCCCCTCCCTTTCTACTG |
| | CCTGG | | | | | CAAGCCACTTAAAGGAAGGAACCATATCT |
| | TAGAC | | | | | CATTCCTCTTTTCATTCTTAGCATCTGACA |
| | CTAGT | | | | | CAGTGCCAGCATGAAAAATTCCTAACAAA |
| | TGG | | | | | AGTATGCTGAATACATTAATAACCAGTACT |
| | (SEQ ID | | | | | TAATAAAAATGTGTAAAAACCGGGGTGAG |
| | NO: 825) | | | | | TTGACTGAGTACATCTATGTTAGGGCAAT |
| | | | | | | ATAAGTTCCACCAACAAGATACCAAGTCC |
| | | | | | | CCAAAGAGTGGAAGAAATAATCTTCCTGA |
| | | | | | | ATAAGAAAGATTACTTATATCTATACCTGA |
| | | | | | | TGATACATTAGTGGAGTGTTTTTCAGTTCT |
| | | | | | | TT |
| | | | | | | TTAAGATACGAAGAATTATTCTCATATTTA |
| | | | | | | AGTCAATAGGAATTAAAACACATTTTCAAA |
| | | | | | | CTGGTGGACTGCCAACAGAATCAATTCAA |
| | | | | | | TTAGCCAGTTTATCGAGTATACCAACTAG |
| | | | | | | GTCTACCAGGATAGG (SEQ ID NO: 919) |
| 6 | TAGTC | 61.508 | 329 | 202 | 127 | GGTGTGAATCCGGGAGGCAGAGTTTGCA |
| | CCAGC | | | | | GTGAGCCGAGATCGTGCCACTGCACTCC |
| | TACTC | | | | | AGCCTGGGTGACAGAGCAAGACTCCATC |
| | GGGAG | | | | | TCAACAACAACAACAACAAAAGTGTCTCC |
| | G (SEQ | | | | | CCTTCCCTGATGGAATCTGCTGCCAGGG |
| | ID NO: | | | | | AGAACCCACAGTCAGGGAAGAGGGTGTG |
| | 826) | | | | | GGATGCTGCTTCTCTCTTTACTTTTTTTTTT |
| | | | | | | TTTTTTTGATGCAGAGTCTTGCTCTGTGG |
| | | | | | | CCCAGGCTGGAATGCAGTGGCACAATCT |
| | | | | | | CGGCTCACTACAAGCTCTGCCTCCCAGAT |
| | | | | | | TCATGCCATTCTTCTGCCTCAGCCTCCCG |
| | | | | | | AGTAGCTGGGACTA (SEQ ID NO: 920) |
| 7 | GGCTC | 60.058 | 391 | 136 | 255 | GGAACAGTGATCAGTTCTGTTACCTGACC |
| | TGAAG | | | | | ATAATGGCTAAACAAAACAACCAAATTATA |
| | AAAGT | | | | | AATTAAAAGGGGTTTGAATATATAGAACAT |
| | ACGTA | | | | | TCATTTTTCAGCTACTAGCCAAAAAATACT |
| | AAAGA | | | | | ATCTCTACCTGCTATCCCATGTGTTGTGTT |
| | CCAAG | | | | | CTTTTTAGACTGTCTAATTTTGAGCTGAAC |
| | (SEQ ID | | | | | TGTTTCTTAGACTGACAGACAAGTCATAAA |
| | NO: 827) | | | | | TCAAGTGATTGCTATAAATGCTTTTTATTTA |
| | | | | | | TATAGAGAGTGTCTCAGATTTTTACCTTTC |
| | | | | | | TTTCATAAACTTGTCATAAATTTCTAATTCA |
| | | | | | | CCAATAGATGGTTGGTGTCCATTTTTCTTG |
| | | | | | | AGTCTAAGACACTTTTAAAAATTTACTTGA |
| | | | | | | CTTGGTCTTTTACGTACTTTCTTCAGAGCC |
| | | | | | | (SEQ ID NO: 324) |
| 8 | GGGTG | 59.508 | 368 | 237 | 131 | GCTACTGGGGAGCCTGAAGTGGGAGGAA |
| | CGTCT | | | | | TGCTTGGACCTGAGAGTTGGAGGCTGCA |
| | TCATG | | | | | GTGAGCCATGACTGTGTCACTGCACTCAA |
| | GTCTC | | | | | CTTAGGTGACAGAGTGAGACCCTGTCTCA |
| | (SEQ ID | | | | | AAAAAAAAAAAAAAAAGTAATAATAACAGT |
| | NO: 828) | | | | | TGTCTCTAGGTAGATGAAATTACAAGTTTG |
| | | | | | | TATGTGCTTTTCTGAAATGAACAGAAAGG |
| | | | | | | GAAAGAAAATCTCAAACCAACTATACATTT |
| | | | | | | TAAAGAGAGGTAAAGAAAGAAGAAATACC |
| | | | | | | AAGGACAGGTAGGAAAGAAAGGCTGTGG |
| | | | | | | ACATAATATTCCTTACTGCTGAGATGAAAA |
| | | | | | | CTGAATTGTAACATATCCGTTAGTTTCAGA |
| | | | | | | GACCATGAAGACGCACCC (SEQ ID NO: |
| | | | | | | 921) |
| 9 | CCCAG | 61.088 | 349 | 137 | 212 | TCCGGATTCTCCTGCTGAGGCAGGAGAA |
| | GACAG | | | | | TCGCTTGAAGCTGGGAGGCAGAGATTGC |
| | CTTTG | | | | | AGTGAGCTAAGATCAGGCCATTGCACTCC |
| | AATGT | | | | | AGCCTGGGTGACAGAGCGAGACTCTGTC |
| | GGC | | | | | TCAAAAAAACAAAACAAAACAAAAAAAAAG |
| | (SEQ ID | | | | | AGAAAGTCAGTAGCATGTAGATCAGGAGT |
| | NO: 829) | | | | | GTCCAATCTTTTGGCTCCTCTGGAAGAAG |
| | | | | | | AATTGTCTTGGGCCACACATAAAATACAC |
| | | | | | | CATCACCTAACGATAGCTGATGAGCTTAA |
| | | | | | | AAAAAATCACAGAAAAATATCATAATGTTT |
| | | | | | | TAAGAATGTTTATGAATTTTTTACAAATTTC |
| | | | | | | TGTTGGGCCACATTCAAAGCTGTCCTGG |
| | | | | | | G (SEQ ID NO: 325) |
| 10 | GCCCA | 59.258 | 461 | 288 | 173 | CCGACTGCTCTGCCTTCTGAATCATATGT |
| | TGTATT | | | | | AACCAAATCAAGTCAAACAGGTTAGAAGA |
| | GGGGC | | | | | CAACTCACACTTCAGTGTCATCTGTACTCT |
| | ATAAC | | | | | TATCTTCATGAGTGTGGGAATGTACAATC |
| | C (SEQ | | | | | CACTTTCGCTCACTATATTAATTCATTCTG |
| | ID NO: | | | | | GTTCCTCATGTACTTAACCTATTTTTATTTT |
| | 830) | | | | | TTCAGTTTGGATACAACCCAAATCCTCTCA |
| | | | | | | AGCCTTTTAAATGCAAAAAAAAAAAATAAA |
| | | | | | | TTTAAAGTATATGTAGTTAAAAATACTCAT |
| | | | | | | GTCTTTACCCATTCCTTTGAGAATTTCTGT |
| | | | | | | AGAGGCTTTCTCAAAATGCAGAGAGTGGA |
| | | | | | | GG |
| | | | | | | CAGTCATAACATATGATGCCTGCAGATTG |
| | | | | | | GGGTATCTGTCATTTAATCAAGAGAAGAA |
| | | | | | | ATAAACATTTTATGTCATTGATTTATCCATT |
| | | | | | | TTAGTTGCTATCATCTTTATAGGTTATGCC |
| | | | | | | CCAATACATGGGC (SEQ ID NO: 326) |
| 11 | GCTCT | 61.508 | 547 | 316 | 231 | GGCTAGGGGAACTCGATGTCTTTCGAAAA |
| | GGCTC | | | | | TATAGACGCTAGCCCTCCTTGAGACATTA |
| | TTGCA | | | | | TAATTCAGTTATTCATGTACAGTTGGCTAA |
| | GACCA | | | | | AAACACATACCAATCTTTTTGCTTAAGAAC |
| | C (SEQ | | | | | CACACAAGGGAAAAAATGTGGAAATTTAG |
| | ID NO: | | | | | TAAAACTCAATTTTAAGTGTCCATGAATGA |
| | 831) | | | | | CAGAGCACATTCACACTCATTCATTTACAT |
| | | | | | | ATTTTCTATGCCTGTTTTTTATGCTAAATCT |
| | | | | | | GTAGAGTTTAGTAATGGCAAAAGATACCG |
| | | | | | | TATGGTCCACAAGGCCTAAAATAGCTACT |
| | | | | | | ATCTGTACCTTACAGAAAAAAAAAAAGAG |
| | | | | | | CTGACTCTTTTTCTGACCTCTGGTCTAAGT |
| | | | | | | CAAGTCTGTCCCACAAGACACAAGGTACA |
| | | | | | | ATGCTTTTTCCACATGAGGTCAGGAAGAA |
| | | | | | | TCTCAAAACTACAGAGTCAGGCCTCACAT |
| | | | | | | TATCAATAGGACCATCCTAGCCTTCTGCA |
| | | | | | | AGCTTTCAGGCTTTAGTCAAAGCTGGCAC |
| | | | | | | ATTTTCAGTGAATCCTTAGTCCACTGGTG |
| | | | | | | GTCTGCAAGAGCCAGAGC (SEQ ID NO: |
| | | | | | | 922) |
| 12 | CAAGT | 59.038 | 532 | 304 | 228 | GTGATGGGCTTTGTTCCCAACTCTTTTAC |
| | TCCTG | | | | | ATCTCCCTACCCCTTCAACCTTTGGCCTTT |
| | GAATG | | | | | CAGCCCTTCTTTCTCTCTTCCATATTCTTT |
| | CTGCA | | | | | GGTTTGTATGTGGTTTCTCAGTTAATACAT |
| | TGTG | | | | | AGCTAATAGCTCTTATTTTTCTTATGTTTTT |
| | (SEQ ID | | | | | AACCGCTTAGGTCTATTTGGATGTAAGGG |
| | NO: 832) | | | | | TGAAAATTCATTTGATGGAAATACTTGTGT |
| | | | | | | ATATTTAAAGACCCAATTGCTCCTCTGGA |
| | | | | | | GCTTGTACTTTCAAGAATGATTAATCTGTG |
| | | | | | | TAATAAACTGGTTACTACAGTCATTACATA |
| | | | | | | TAATTTTGTGTGAATAGGCTTTTTCATTTTT |
| | | | | | | AAGAAGTTTGTCTAGCTGAGATTAGTGGT |
| | | | | | | GGATTTTCTCCCACTTCTGAAATGTTCATT |
| | | | | | | TATACTGGTTGCATTTTAAGATCATGAAAC |
| | | | | | | AATTCCAGTTACATTGTAAAAAGGATATCT |
| | | | | | | TACGAGTAATTTTATTGAACAAGTTAGAGG |
| | | | | | | CATAAGCTTAAGAGCATTTCCATGAAACA |
| | | | | | | ACACATGCAGCATTCCAGGAACTTG (SEQ |
| | | | | | | ID NO: 923) |
| 13 | CCACC | 61.508 | 368 | 222 | 146 | CAAGATAGGGCCTTGCTGTGTTGCCCAG |
| | GTGCC | | | | | GCTGGAGTGCAGTGGCACAATCACGGCT |
| | CGGCC | | | | | CACTGCAGCCTCGACTTCACTGGCTCAA |
| | TATTTT | | | | | GCAATCCTTCTACCTCAGCCTCCCAAGTG |
| | (SEQ ID | | | | | GCTGGGACTCCAGGCATGCACCACCACA |
| | NO: 833) | | | | | CCTGGCTAATTTTTTTTTTTTTTTTTGCAGA |
| | | | | | | GATAGGGTTAATTGAGCATTTTTTCCTCCT |
| | | | | | | TTCTTAACATATCAGTTATAATCATTTTTTA |
| | | | | | | AAGTTTTTTTTAGAGGTTGCCCTAGAATTT |
| | | | | | | GCAGTGTACATTTAGAGCTAATCCAAGTC |
| | | | | | | TTCTTTCAAATAACACCATGCCACTTCATG |
| | | | | | | GGTAATGCTAGTGCTTTATAATAATAAAAT |
| | | | | | | AGGCCGGGCACGGTGG (SEQ ID NO: 924) |
| 14 | CAGCC | 61.288 | 437 | 271 | 166 | CCTGGGATGGGAATCAGAACTGCCCAGT |
| | TGGGA | | | | | AAACGCATTAAGCACACCTGCCCTTCTTC |
| | TCCAG | | | | | AGTTGGTACAGTGATTGGTGCCCTATTTA |
| | TGACT | | | | | ACTTTTCCTTTTCCCTCACAGGTCTTCTGG |
| | GT | | | | | AGACTTCTGAGCAACCTGCTATACGTGTC |
| | (SEQ ID | | | | | CTGTCGTTGGTGATGTTTCCATGTCTCTG |
| | NO: 834) | | | | | TGTGATCTGCAAACCCCTCTGCTAAAAAA |
| | | | | | | GAATTCCGATTCGCATTCTTACCACTGGG |
| | | | | | | GCTGCACCTGCTCCACCTGTCTTTACCTT |
| | | | | | | GCGCACACACTGTTTGGGGAAGATGCTTT |
| | | | | | | TTCTGATACTTTCTGAATGGAAAGGCATC |
| | | | | | | ATAAGAAGGACATATTTGTGAAGTGCTTG |
| | | | | | | AAAGTCCT |
| | | | | | | CTCATACTTTCCAACGCAGAAGGACTAAA |
| | | | | | | GTCTTTGTCAAAGTTAAGGTAAAATACATC |
| | | | | | | ACAGTCACTGGATCCCAGGCTG (SEQ ID |
| | | | | | | NO: 925) |
| 15 | CCAGC | 61.508 | 526 | 303 | 223 | CAGGTATTATGTTAGGCCATGGGGATACA |
| | CTCCT | | | | | AAGATGATTAAAACCACTTCCTCCCCTCA |
| | GACAA | | | | | AAGAATTCTCATGATGGCAGAAATGGGGC |
| | CAGAG | | | | | ATATGCAAACAAGTAGTCAAACAAGCAAT |
| | C (SEQ | | | | | TCCAAACATATAAGAGCTATGATAGATGA |
| | ID NO: | | | | | ACATTCAGAGTGCTTTAAAACCACTGAGA |
| | 835) | | | | | AAGGAACAATCAATCTGTCTCCTTTCCATA |
| | | | | | | GAGTAGACATATGAGCTGAGACTTGACAG |
| | | | | | | ATAATTAGGAGTTCACTGGTAGGCATGGG |
| | | | | | | ACACTGTAGAAAGAACTCTGAAAAAGACA |
| | | | | | | TTCCAGTTATAGAAAATGTAGAGACAGGG |
| | | | | | | GGAATAAAAACACATGGAAAGGAGATTAA |
| | | | | | | AATTGCTAACACTTAGGTTTTCATCATCAA |
| | | | | | | TCTTCCCCTCAGAATTACTATTGTGATCAT |
| | | | | | | AAAATATTATTACTATTAGAAGTAGTAATA |
| | | | | | | GTAGTAGCAAGGCTTACATTTATTCATCAT |
| | | | | | | CTACTATGTACAAAGCATTTTTTTTGACAG |
| | | | | | | AGTCTTGCTCTGTTGTCAGGAGGCTGG |
| | | | | | | (SEQ ID NO: 926) |
| 16 | GAAAC | 61.508 | 395 | 270 | 125 | CGTTCTCATGGACCTGCCCAGTTATTTTG |
| | AGGGA | | | | | GTTCTAAGCTAGAATCAATCTGCTAGATG |
| | GGGGG | | | | | GTTTACCATGGCAACACAAGGTGAAGCA |
| | TGCAG | | | | | GAAACCCTGGGACAGGAGAGTCAAGCGC |
| | T (SEQ | | | | | TGTGGCCAGGACACCTAAGGCTTAGAGG |
| | ID NO: | | | | | GTTTTCCAGTAGAACCTTTCCATATCTTCC |
| | 836) | | | | | TTTGTAAAAGCTAAGGGTAGGAGAGGTGT |
| | | | | | | GTGGGAGAACCACAGCCAGCAACAAAGG |
| | | | | | | GGGTCCTTTTTGCTAAAAGAGACTCAGCC |
| | | | | | | AGTTGCTTTGTCAGGACAAGAGGGAAGG |
| | | | | | | AGAGTAGGGATGGGCTAGTAAAGACAAA |
| | | | | | | CTTCACACTGACTGTGAAACTCAGACTCA |
| | | | | | | TCCTTGTCTAGTCCACTGTGGCTAAACGA |
| | | | | | | ACACTGCACCCCCTCCCTGTTTC (SEQ ID |
| | | | | | | NO: 927) |
| 17 | GTGTG | 59.038 | 477 | 321 | 156 | CTATCAGTGAAATCTTTGCCCATTCTGTTT |
| | AGCAA | | | | | GCAAATACAGTTTTTGTGCTCTTTCTAGAA |
| | CTAGA | | | | | GTTTTATATTTTTGTAGTTTACATTGATTTA |
| | CAAAG | | | | | TATAATTTGCTGCAATTTAATTTTTCTTGTG |
| | GAGG | | | | | ATGTGAGAAAAACATAAAGTTTCCACCCC |
| | (SEQ ID | | | | | TTATCCTAAATTTTAAAGTTGTTTGAGCAC |
| | NO: | | | | | CATTTGTTGAAAAAACAATCCTTCCCCCAC |
| | 837) | | | | | TAGGATCTTTGTTGAAAATCAATTGATAAA |
| | | | | | | ATATATGTATATTTATTTCTGGTTTGTATAT |
| | | | | | | TTTGTTCCATTGATAGAGATATTTATCCTT |
| | | | | | | CTGTCTTTAATTCACCTTCATTTGAAGAGT |
| | | | | | | ATTTTTTATGAATATAGAATTTTAGATTGAT |
| | | | | | | TTACTTTTTCTTTCAGAATTTAAATATGCCA |
| | | | | | | CTCAATTGTCTTCTGGTTGCATAAATTCTG |
| | | | | | | ACAAAAACTCAATGATTATTTTACAATTTC |
| | | | | | | CTCCTTTGTCTAGTTGCTCACAC (SEQ ID |
| | | | | | | NO: 928) |
| 18 | GGGGA | 60.058 | 440 | 315 | 125 | GGGCTTCCCTTTCTTCCACTAGATTAAGTT |
| | GTTAG | | | | | CAGAAGCCACTCATTTATATTTAAAATATC |
| | ATATAA | | | | | ATATTATGTAAAATGTTAATCCAATAACCT |
| | AAAGA | | | | | AAGTTTGAAATATTATTTTTTTCCTCTCTTG |
| | CTAGG | | | | | CACTTTGTTAATATAGATGTTTCATTGTTCT |
| | GGAG | | | | | GTAGGGCCTCTATCTTCCCTTGAGCTGTT |
| | (SEQ ID | | | | | TTTGAGTAACTTGAATGCTTTCCATAAAAC |
| | NO: 838) | | | | | ATCATTTTTACTATCACTAGAAATTTAATCT |
| | | | | | | CAAGCTATATTTGTGTTTTTCTCAGTGTAA |
| | | | | | | TAAGCCACTTCATTGCTAAAACAAACTTTG |
| | | | | | | TATTATTGAAAATTTCCAACAGGTAAAGAG |
| | | | | | | AACAGTATATAAACCTCCATGAATGAATTA |
| | | | | | | TGCAGATTAAACAGTTATCAACATTTTTCT |
| | | | | | | CATTATTGTTCCATTTAACTCCCCTAGTCT |
| | | | | | | TTTTATATCTAACTCCCC (SEQ ID NO: 929) |
| 19 | GCCTG | 60.908 | 454 | 172 | 282 | CCCCTCTCCCAAAAGGAGAGCTTTATGAT |
| | GGTAA | | | | | GACATGTGATGAAGAATTTTATGCTGTTCT |
| | AAGAG | | | | | GCTAAAATCACATTTACCATTTCGCATATT |
| | CGAAA | | | | | GGGCTTCAATTTTTAATTTACTCGTTTTAAT |
| | CTCC | | | | | AAGCCTCATTACTTCCAAGGTTATTTATAC |
| | (SEQ ID | | | | | AGTGTTTAACTCCTACTGGGTGTTTCTTTT |
| | NO: 839) | | | | | TCTGAGTCTTTTTTAGCTTTTAAGTAATGG |
| | | | | | | CTGTGATTATATAATTAAAGCAAACTACAG |
| | | | | | | CAGATTACATTAAGAAGTTCACTTTTTTTG |
| | | | | | | GAAGAAGGAAGTTTGCTCTTTGTTCACTTT |
| | | | | | | CATATTATTCATTTTTCATAATTTAATATTA |
| | | | | | | CCAAAGATAGTGCATAAATATTATAATTAG |
| | | | | | | CATATTTGTTGTTTTTCTTGAATGGATATT |
| | | | | | | GTGATTTACCTTTGTTTTTGTTTTTTGTTTT |
| | | | | | | TTTGAGACGGAGTTTCGCTCTTTTACCCA |
| | | | | | | GGC (SEQ ID NO: 930) |
| 20 | TGAGC | 61.508 | 520 | 327 | 193 | GCAAGTGATACAACCCCAAGCCACTAACA |
| | TGCCT | | | | | TATATGGCAAGAAGGAGAAGCAGAAGAA |
| | TCCGC | | | | | AACCAGGGAAAAGAAAAAGCAGATACTCA |
| | CTCTG | | | | | TTGCCCTAAGAAAAATAATTTTGTAATCAC |
| | T (SEQ | | | | | AAAATTAAATTACTCTGCTGTGAATCCCAG |
| | ID NO: | | | | | TGAAGAAATGGCCTTGTTGGAATGGTTTG |
| | 840) | | | | | ATGTGCTCTCACAGGCATCTCAAATGGGA |
| | | | | | | AAACATACCCACAGGAAAAATTTGGAAGG |
| | | | | | | CAAACAGTAAAAACTTTCACATTAATCTGG |
| | | | | | | AAAACAAAAGAGTGGCCATTTATACCTTAT |
| | | | | | | GCCTAACTCTAAAAAACTCTTAAGTGCTTT |
| | | | | | | GCAGTTTATTTTTGGAAAAGAGAGTAGGA |
| | | | | | | GAAAGAAGAAAGTGGGGCAGAATAACAG |
| | | | | | | GGAGAGAGGGAAAGAAACAGATTTTTTTT |
| | | | | | | TTCCTTTTGGTCCAAAAGATGTTAAAAAGA |
| | | | | | | ATGTTACTCTAAGGGAAGAGTGGTATTTT |
| | | | | | | CTACCTCATTGGTGAATCTTGGGCTAGTC |
| | | | | | | CTACAGAGGCGGAAGGCAGCTCA (SEQ ID |
| | | | | | | NO: 931) |
| 21 | CACCT | 61.088 | 421 | 292 | 129 | CCAGCCTTCAGTTTGCCAAGGGGTTGGC |
| | GTAGT | | | | | ATTAATCAAATCGTTTTCTGTAATTCCTGC |
| | CCCAC | | | | | CATGGAGCCTTAGTTTCCTTTTATAATCTG |
| | TCAAG | | | | | GTTCTTCGGCCTTCATGCAGGTTCAATAA |
| | AGC | | | | | AAGCTACCTGAAATCTTTCTAATAAATTTC |
| | (SEQ ID | | | | | ATATTTTCTAGATAGAGCCTGTTTCTGTTG |
| | NO: 841) | | | | | CCTGTAGCCAAGGAACCCTAGTTGATTTT |
| | | | | | | TTTTCTTTAATTTACACAACATTGTTATTGA |
| | | | | | | ATAGTTTCTGTCTGCCAGGCAATGTACTA |
| | | | | | | AACGCTAAACTCTTTACCTGCATTATCCTA |
| | | | | | | TGCAATTTTTTTTTGAGATAGGTTCTGTTG |
| | | | | | | CCCAGGCTGGAGTGCAGTGGTATGATCA |
| | | | | | | AATGCAGCTTCTGTTTCTGGGCTTAAGCA |
| | | | | | | ATCCTCCCACCTCAGGCTCTTGAGTGGG |
| | | | | | | ACTACAGGTG (SEQ ID NO: 932) |
| 22 | CTCTT | 60.058 | 463 | 279 | 184 | GCACACCAGAGGAGAGCTGCTTGCTTAG |
| | GCTAT | | | | | TAAAAATTATGACATTCACAGCAAAACAGC |
| | ATCTT | | | | | AATCCTCTAAGATCATTTTTTGTGTCCATA |
| | GGAAG | | | | | GAGATGAAGCTATGGAGTTGGTGTGCAT |
| | GTTAT | | | | | GTGACTTGTGAATCACCAGAAAATCTTCA |
| | GTGGC | | | | | GTGTTTTAATTTCAAAAACACCTTGACTCT |
| | (SEQ ID | | | | | CTCTGGGGCAAGGGGCGTGTCACTGATC |
| | NO: | | | | | GTCTCTGTGCCTTAATTTATTTATCTTAAG |
| | 842) | | | | | CAGAACAATTTTTAAATAACTACCTTCTTTA |
| | | | | | | CCACTTAGAGACATGTGAGGTCCTGTCAA |
| | | | | | | GTATTTTTCAGAAAGATACTAATTAAGCAT |
| | | | | | | GCATTTTACGGTTACTAATTTAGTACGGTA |
| | | | | | | AATGGATTATACTTACAATAACTAGGAAG |
| | | | | | | GGCTCAAAGTATTTATACAAAATCAGTCAA |
| | | | | | | AATGGGATAAAATGTCAAGTAGCCACATA |
| | | | | | | ACCTTCCAAGATATAGCAAGAG (SEQ ID |
| | | | | | | NO: 933) |
| 23 | CGGCT | 61.288 | 434 | 145 | 289 | CCCAGTCTTGGGCAGCCCTTTATAGCAGT |
| | TACCC | | | | | GTGAGAACAGACTAATACACCATTCTTAC |
| | ATTCC | | | | | CACTTTCTAACAGTTCTTGTTTTCACTTTCT |
| | TCCAT | | | | | GTATGACTTTTCAACCCATTTTCCCATCTA |
| | GC | | | | | CTTCTACCTTCACCTTTTCACTTATGAATT |
| | (SEQ ID | | | | | CATTCTTCAGTCTTTTTCAGATACGAAGTC |
| | NO: 843) | | | | | TTCTTACCTTTCTCTTATCAATTTCATTTTT |
| | | | | | | TTATATTCCCTGATGTCTTACATGTACTTTT |
| | | | | | | GTGAGCATATTTGTGTGTGTTCATATTTAT |
| | | | | | | ATCGTAGTGTCTGTATATATTCATAAATAT |
| | | | | | | GTCTGCATATGTACATTTTTATATCTATCT |
| | | | | | | GTGTGCATTATAGACTGTATATGTATCTTT |
| | | | | | | CGGTTGTGGCTAAAACTGAGCAAGAAGTT |
| | | | | | | TATTTCATTAGTTACAGCTTCTGCATGGAG |
| | | | | | | GAATGGGTAAGCCG (SEQ ID NO: 934) |
| 24 | AGTGG | 61.508 | 385 | 136 | 249 | GCATTTAGGACAGAGAGCGAAGCATATGT |
| | CCCAA | | | | | AAGGGCCCCAAGGCAGGTAGAAGCATGG |
| | GCTGG | | | | | CAGCCAGGGGGGACTGAGGGAAAGACA |
| | CACCA | | | | | TTGTTGCTTTTGAACACAGTGAACTAAAAA |
| | T (SEQ | | | | | AAAGTGTGGAATACTAGAGGCAAAAAAGG |
| | ID NO: | | | | | TAGGTAAAGACTGGATCATACAGTTATAA |
| | 844) | | | | | AGATTTTCCCCTAAAAACAAATACAAGCTA |
| | | | | | | CTGAAGTATTTTAAGTTGAGATGGGGTTG |
| | | | | | | AAGGACCAGATCAAGTTTATGTTAAAAAAA |
| | | | | | | AAAAAAACCACTCTGGCTGAAGTATGGAT |
| | | | | | | ATCAGATTTGAGGGGAGGACAGTGTGAA |
| | | | | | | TGTGAGTAGATCAATTAGGAGTTCGTTAT |
| | | | | | | AGTAGTTGTGCCAAGAGATGGTGCCAGC |
| | | | | | | TTGGGCCACT (SEQ ID NO: 935) |
| 25 | CAGGC | 61.508 | 531 | 206 | 325 | GGCCCTTGCTATGCCAGGGAAGTTTAAAA |
| | TGAGG | | | | | ATCTTGAGAGGAGTAAGTCTGTTATAACA |
| | GATAG | | | | | GATATTCTTTCACTCTTCCATATAATTGCC |
| | CTGGG | | | | | CTCCATTTACTGCTTCCTCTTTCCTTTCTC |
| | A (SEQ | | | | | TTCTCTTTTCCCTTTTATCTTTTTCAATGTT |
| | ID NO: | | | | | TTCTCATAACTTTTTCTTTTCCTTTCCATTC |
| | 845) | | | | | TACTGGCATTACATCTTAGCTCCTGTGGT |
| | | | | | | GGGTATGCAGTATTTGTTTCAGTTTAAACT |
| | | | | | | ACATGCAAAGCATTTCAAAAAATACTGTGA |
| | | | | | | TGAAACATACTGCTTGATAATTTAATTTTG |
| | | | | | | TTCTAAAAATAGTTATTATTTGGGGACATT |
| | | | | | | TTAAATAAAGCTAGTCCTAGTGCTAATTTC |
| | | | | | | TTTATATTTGTGAAATAACTTTGATAAGAAT |
| | | | | | | ATCTTATTTTTAATAATACACTCTAACAAAT |
| | | | | | | AAACACTTTAATGAAGAAAAATAATAGGTT |
| | | | | | | AATTGATGTCCCAAGGCTTCAAAATTACTT |
| | | | | | | AGTCACTACATATGAAATAGAACTTAGATT |
| | | | | | | CCCAGCTATCCCTCAGCCTG (SEQ ID NO: |
| | | | | | | 936) |
| 26 | GCCTC | 59.508 | 395 | 243 | 152 | CACCATTCTCCCTGCCTCAGCTTCCCGAG |
| | CCCAG | | | | | TAGCTGGGACTACAGGCACCCGCCACCA |
| | AGAAG | | | | | TGCCCAGCTAATTTTTTGTATTTTTAGTAG |
| | ACAAC | | | | | AGACAGGGATTCACCATGTTAGCCAGGTT |
| | (SEQ ID | | | | | GGTCTCGATCTCCTGATCTTGTGATCCGC |
| | NO: 846) | | | | | CCGCCTCGGCCTCCCAAAGTGCTAGGAT |
| | | | | | | TACAGGCGTGAGCCGCCGCGTCTGGCC |
| | | | | | | CCAAATGTGAATTTTTATTGCAACTATCCT |
| | | | | | | TTCCCTGTTCCATCATTCGGAGATTTTTTT |
| | | | | | | TTAGAATATAAATTGCTGGTCCATAAAAAC |
| | | | | | | CTCTCTCAGACCTAAGGGAAGATACTGCA |
| | | | | | | TCTGGGCCAGGGATCTTGAACTTTGAGCT |
| | | | | | | GATTAAAATGATTGGATGAATTGCTAGGTT |
| | | | | | | GTCTTCTCTGGGGAGGC (SEQ ID NO: 937) |
| 27 | GGAAA | 61.288 | 343 | 132 | 211 | CAGGAGGCTGAGGTGGGTGAATCATTTC |
| | GGGCC | | | | | AGCCCGGGAGATCAAGAATGCAGTGAGA |
| | TCCAG | | | | | TACGATCACACACTGCACTCCAGTCTGGG |
| | AAAGG | | | | | CAACAGAGCAAGGCCCTGTCTCAAAAAAA |
| | AC | | | | | CAAAACAAATAAAAAACAAAAATAGTGGG |
| | (SEQ ID | | | | | TGAACAGAGTAGTAAACCAATGGCCAGTGT |
| | NO: 847) | | | | | CAAGCTTGCCACATAGGAGA |
| | | | | | | TGAAGAAGGACCACCCACTGCCCCATAAT |
| | | | | | | TCAGAACTAGGGCCAGGGGTTAGAGCCC |
| | | | | | | TCTCCACAGTCTACTGGACATAACCTAAG |
| | | | | | | CAATGACTGCAGGGCACGGAAGATGGCA |
| | | | | | | TAGAGGATGTGTTTTGTCCTTTCTGGAGG |
| | | | | | | CCCTTTCC (SEQ ID NO: 938) |
| 28 | TCCTC | 59.508 | 373 | 130 | 243 | GCTAGCATTTGCACTCCTGGGCAATTATC |
| | CCTTC | | | | | CCAAAGAAATGAAAACTTAGGTCCACACA |
| | CCTAC | | | | | AAAACTTATACACAAATGTTCATAGTAGTA |
| | CTTCC | | | | | TTATTAGAATAGCTAAAAATTAAAAACAAT |
| | (SEQ ID | | | | | ATGCATGTCCTTCAACAGGTGAATACAGT |
| | NO: | | | | | GGTATATTCATAATATGAAACATTATTTATA |
| | 848) | | | | | CTGAAAAGAATGAACTATTGATACATACAA |
| | | | | | | CAAAACTGATGGATCTCAAGGGCATTATG |
| | | | | | | GCACATGAAAAAAGCCAATTTCAAAGGGT |
| | | | | | | TATATACTGCAAGATTCCAGTTAGAAAACA |
| | | | | | | TTCTCAAAATGACAAAATTGAACACAGATT |
| | | | | | | AGTGGTTGCTAGGGGTTAAGGATGTGAG |
| | | | | | | GAAGGTAGGGAAGGGAGGA (SEQ ID NO: |
| | | | | | | 939) |
| 29 | CAGGA | 61.508 | 438 | 312 | 126 | CACCTGTCACCACGCCTAGCTAATTTTTTT |
| | GGCTG | | | | | TTTTTAAAGATCATACTGCTTCTGTCCCTT |
| | ACGTA | | | | | TTTTTTTATTATTATTATACTTTAAGTTCTAG |
| | GCAGG | | | | | GGTACATGTGCACAATGTGCAGGTTTGTT |
| | A (SEQ | | | | | ACATATGTATACATGTGCCATGTTGGTGT |
| | ID NO: | | | | | ACCCATTAACTCGTCATTTACTTTAGGTAT |
| | 849) | | | | | TTCTCATAATGCTATCCCTCCCCCCTCCC |
| | | | | | | CCTAATTTTTTGTATTTTTACTAGAGATGG |
| | | | | | | GGTTTCACCATGTTGGCCAGGCTGGTCTT |
| | | | | | | GAACTCCTGACCTCAAGTGATCCACCTGT |
| | | | | | | CTTGGCCTCCGAATTTTTTTGTTGTGTTTT |
| | | | | | | TTTGAGACAGGGTCTCATTCTGTTGCCCA |
| | | | | | | GACTGGAGTGCGGTGGTGCAATCATGGC |
| | | | | | | TCACTGCAGCCTTGACTTCCTGGGCTCCA |
| | | | | | | GGGATCCTGCTACGTCAGCCTCCTG (SEQ |
| | | | | | | ID NO: 940) |
| 30 | GGTAT | 59.758 | 467 | 290 | 177 | GTACAGAGTAACCTATAAGTGTGACATAC |
| | CAGAG | | | | | TTTTGCTTTCAGTAGTTTCATGTAAAGAAA |
| | AATCTT | | | | | AAAACTTGAAAATAGATTACTATTAACCTG |
| | GTATTT | | | | | AGGACCCATGGGAATAACAGACACTGGG |
| | ATGGC | | | | | GAGGTAGGGTGGGGAGCGGGAACAAGA |
| | ATCAG | | | | | GCTGAAAAACTACCTACTGTGGACTCTGC |
| | G (SEQ | | | | | TCACTACCTGGGTGACAGGATCATCCATA |
| | ID NO: | | | | | CCCTAAACCTCAACGTCACACAGTACACC |
| | 850) | | | | | CAGCTAACAAACCTGCCCATGTGTTCCCT |
| | | | | | | GAATCTAAAAAAGAATCAAAATAATTGTTT |
| | | | | | | AAAAAAAGAAAAAGACAATAGTATTACCCA |
| | | | | | | TGGGACAAAATTTGTACTATTAGCAAGAAT |
| | | | | | | CATTTGTGTCTCATTTAGAAACAATTTGAC |
| | | | | | | TTTTGTTCCATTGTTTAAACTTTGACAAAAA |
| | | | | | | TGGTTTTGAATAGATCTTTATAACCTGATG |
| | | | | | | CCATAAATACAAGATTCTCTGATACC (SEQ |
| | | | | | | ID NO: 941) |
| 31 | GGAAA | 61.088 | 475 | 327 | 148 | GGGGATTCAGAGATTGTTAAAGAACACAA |
| | AAGCC | | | | | GGTAAACACAATCATTTGAAATTTAAGATA |
| | GCAGG | | | | | TGTTTTTAAATTTCAAGAATAAGTTTATTTC |
| | AAGCT | | | | | AGACATTTCTTTCACTTTATCAAATCTCTTA |
| | GCA | | | | | ATCAAAAATGAAACCCCAGATACCATATTT |
| | (SEQ ID | | | | | ATGTTATTTTGAGGTTGTGTTAATAAATAT |
| | NO: 851) | | | | | AGGTGTTCTTTTTATGTTAAGTAGGAATCC |
| | | | | | | TTAGCAACTTAACTAGTAGTGCTTGTAAAC |
| | | | | | | AGACAACAACAACAAATCCTAAAAACCAG |
| | | | | | | ACATCAGTGAAAACAAACCAACAACCAAA |
| | | | | | | AATTACTATCTGTACCTTTAAATTTGTAAG |
| | | | | | | CATTTTTTAGAGTTTGTTTGATAAACTTAG |
| | | | | | | GTTGGTTTTAAAATTTAGCTCAGTGACTCA |
| | | | | | | GTTGCAGCTGTTCCAAATAATTGGTCATG |
| | | | | | | AGCTTTTTATACTAGCTGGCTTAATCTAAC |
| | | | | | | AGAGTGCAGCTTCCTGCGGCTTTTTCC |
| | | | | | | (SEQ ID NO: 942) |
| 32 | GTGGT | 59.668 | 409 | 248 | 161 | GCACCTTGTCTATTTCTTAGAGTTGTTGAG |
| | ACAAA | | | | | CAGAAGAGTCTGTATAGGTGACAGAAAGA |
| | TGAGT | | | | | GGACTTTAAAAAAATGTATAAAATGAATTT |
| | CAACA | | | | | GAAGAGTGTGATAATATGTAAAGAAACTT |
| | TTTTGT | | | | | ATAATCAAGAGACATAAAAATAAAAAGTAG |
| | CATGT | | | | | TCAAAAATTGAGAAGATATTTTAGCCTTTA |
| | CTG | | | | | TGTCCTTACCCTTAGAGTAAGATATCTTTC |
| | (SEQ ID | | | | | ATTATACCTATCTATGCTTCTCTATTTACCT |
| | NO: | | | | | ATGTATATATACACATTCATATACTTTTTCA |
| | 852) | | | | | GTTGTATCATGTAAGTTCATATGGTCTTTC |
| | | | | | | TGAAATAAAAAGCCAAAACCAAACAGTAG |
| | | | | | | AACATAATAATTGACTTTATGCTGTTTTTCT |
| | | | | | | CTGAATGACAATATACAGACATGACAAAA |
| | | | | | | TGTTGACTCATTTGTACCAC (SEQ ID NO: |
| | | | | | | 943) |
| 33 | CACGG | 61.508 | 342 | 127 | 215 | AGTTTGCGTCTGAGCCTGGCCCTCCAGC |
| | GGCAC | | | | | CATGGCCCAGCCCAGCCCAGCTCTGCTC |
| | CTCAC | | | | | CAACGCCGTCCCCAGCCCTACCCCCTCT |
| | CAACA | | | | | TCCTCCTTCCCATCATCCTATTTTCTTTAAT |
| | A (SEQ | | | | | GAGCCAGCTCTTTGATAACTGCAGTGTGT |
| | ID NO: | | | | | TTTTTAGGAACTAAACAAACTGAAGCTGC |
| | 853) | | | | | AGGGTATTCTTTTTTTTAACAAAAGAGCTC |
| | | | | | | ATTGAATAAGCAATGGGTTTTTCTGCAACT |
| | | | | | | ATTTTTAAAGATGGAGCTGCAGGCTAGGC |
| | | | | | | TGTGAGGAAAATCACAGAGAGTGCTCTCC |
| | | | | | | TCAAGGTCAGGGCATTGAGGGAAAAATC |
| | | | | | | CATTGTTGGTGAGGTGCCCCGTG (SEQ ID |
| | | | | | | NO: 944) |
| 34 | CCTTG | 59.148 | 423 | 291 | 132 | CTGAATGGTGAGGGCTCCCTTAAATAATG |
| | CCACA | | | | | TAACAGTATTGTTATTCAGTTCAAATGTAA |
| | CTCAT | | | | | TTTAATTCAGCTACAATATGAATTAAGTAG |
| | TAATG | | | | | TTTTGGGGAACTAGCCTGGAAACTAACCA |
| | CCC | | | | | TTGACAAAACTGTTCAGATTGGAACAAAAT |
| | (SEQ ID | | | | | TCTACAGCATTTTTGAACTTTTAAGGGTCA |
| | NO: 854) | | | | | ACATTTGAAAGTTTGATGCTAAATGTTGAC |
| | | | | | | TTTCACAAATGAGAGAAAAATGCAAGAAT |
| | | | | | | ATCCAGGGTAAGTATTGGGAATTAGCTAC |
| | | | | | | AAATGACTTTCCCTTTCCCTGAAAGATAAC |
| | | | | | | AATGCATAGTTTTGTATAGAGCCCACTTTA |
| | | | | | | CAGAGTATGATAGTGAAGATATGTTTATCT |
| | | | | | | TGCTGCTTTCATTGCAGCTTTAAAGGACC |
| | | | | | | ATAACTAATTTTAAGGGGCATTAATGAGTG |
| | | | | | | TGGCAAGG (SEQ ID NO: 945) |
| 35 | CGTTC | 60.178 | 490 | 204 | 286 | GTCTCCCAGGGGAAGAATCATAGAACAG |
| | ATGTG | | | | | TGGGGAAGAAATGCATTATTCAATAAATG |
| | TTTTCA | | | | | GTGCTGGAAAGATAGTTTAGCAATTTGGA |
| | GCGGC | | | | | AAAAAAATCAATTTCAAGTCTCATCTTACT |
| | TATGTT | | | | | GCACACTAAAATAAATTTTAATGGACTAAA |
| | TC | | | | | GAACCAAAATGATATAAAAAAGACTATAAA |
| | (SEQ ID | | | | | AGCACAAAAAAACTCTACTGGGGAATACT |
| | NO: | | | | | TGGTAAGGTTAAAAGAGTTGAACAAAATC |
| | 855) | | | | | GTAAAAGAAAAGTTACAAATTTTATTAAAT |
| | | | | | | AACATTTAAAATTTCTGTCTGTAGCTCTTC |
| | | | | | | CTGTGTCTACTCAACAAAAATCAAAATAGT |
| | | | | | | TATGAAAGAGTATAAACACTACCACAATTG |
| | | | | | | GAAGACAGAATAGTTCTATTAACTCTATGC |
| | | | | | | ATTTGTCAAAACTCATAGAACTGTAAAAGT |
| | | | | | | AAAAACTTTACATAAGCTAAAAAATAAATC |
| | | | | | | ACAAAAAGGATATAAAAGAAACATAGCCG |
| | | | | | | CTGAAAACACATGAACG (SEQ ID NO: 946) |
| 36 | CACAA | 60.438 | 452 | 133 | 319 | CAGGTCCACAAACCCCTCCCATGGCTCTA |
| | ACGTT | | | | | GGGGAGAATCCTTCCTTGCCTTTTCCAGC |
| | CACTC | | | | | TTCTAGCAACTCCTGGGATACTTTAGCTT |
| | CACAG | | | | | GTCACTGCATAACTCCAACCTTTGCCTCT |
| | CAACA | | | | | GTCTTCACCATATTTCTATATGTAAAGGCT |
| | TC | | | | | TTTTTTGGATTTAGAAGACACCTGAATCCA |
| | (SEQ ID | | | | | CGATGATCTCATCTCAATCCTTATCTTAAA |
| | NO: 856) | | | | | TCTGCTATGATCCTATTTCCAAGTAAGGTT |
| | | | | | | ACATTCTGAAGTTCCGGTGGCCAGGTATC |
| | | | | | | TTGATAGGACACTATTCAACCCACTGAAA |
| | | | | | | G |
| | | | | | | TCCTTATTTACCCCTCATGTATTGTTATTCT |
| | | | | | | CCCTGCTTAAATTTTAGGATCAGTAACTAC |
| | | | | | | TCATCCAGATGTTGACTCTCATGTTCTAAT |
| | | | | | | TGAATTTAAACAAAAAGTTACTACTACAAT |
| | | | | | | GAATGTTTTGATGTTGCTGTGGAGTGAAC |
| | | | | | | GTTTGTG (SEQ ID NO: 947) |
| 37 | GCCTA | 59.378 | 480 | 317 | 163 | TCACCCAGGGTCACACGGCTAGTTAGTC |
| | CCTGA | | | | | ACAAAGTGAATCTAGAACACAAAGTCTCC |
| | AAGTT | | | | | TTTCCTCCAATCCAGAGCACTTTCCACTA |
| | CCCTG | | | | | CATCACAAGGGAAGAGCAAAAAGAAAAAA |
| | G (SEQ | | | | | TAACATCTAATTTTACCAGAAAATAAAATA |
| | ID NO: | | | | | CAGGCAGGCCTGAACCACAGCCAGAGTT |
| | 857) | | | | | AAATGTGGAGCATACCTACCTCCAAACCC |
| | | | | | | AGCTGGAACCTCAAAGGTTAGTATATATTT |
| | | | | | | TAGACTCTTCAAAAATATTTTAATCACATG |
| | | | | | | TGAATTTGAGGAAAGCTCTGATTTTAAAAA |
| | | | | | | CTCAAAAACACTCAGTAGTCACACAGCAT |
| | | | | | | AAAGTTATGACAGTATTAGCTGGATAATAA |
| | | | | | | ATTTGTAGACCACAAACTGTCCATCCAGA |
| | | | | | | CAATTTACACTTTAAAAACATCCAACCTTC |
| | | | | | | TTAGAATTAGTTTGTAAGTCAGGCAAAGA |
| | | | | | | GGACAGATTTTTCTATATTACCAGGGAAC |
| | | | | | | TTTCAGGTAGGC (SEQ ID NO: 948) |
| 38 | GACTG | 59.038 | 444 | 159 | 285 | GGAGGGGGCTGTCTTTCTGGTTCACTAG |
| | GGATC | | | | | CTGTGTCTTCCTCATGTGGTGGAAGGGG |
| | TTAAA | | | | | TAAGGCAGCCCTCTGGGGCCTCTTTTATA |
| | CATCG | | | | | AGACACTATCCTCATGATCTAACCACTTC |
| | CCCT | | | | | CTAAAGACCCCACCTCCTAATACCATCTTT |
| | (SEQ ID | | | | | ACCTTGGAGATTAGGATTTCAACATATGA |
| | NO: 858) | | | | | ATTTTTTTCAGAATGCAAATATTGAAACCA |
| | | | | | | TAGCACAATCCCACAGATAGACAGGAGAT |
| | | | | | | AGATACCTCAACTAACTGGTGTTGACCAT |
| | | | | | | TATTTGATTGGTCCATACTGTAGGACCAC |
| | | | | | | TCCATACTATAGGACTCTTGCTTTGTACTG |
| | | | | | | TAATTGGACTCTTCAGGAAGAACAGTAAC |
| | | | | | | AATTATTTTAAAGATTAAAGGGTGTCTGTT |
| | | | | | | TATTTAGTATGTTAGTTACAATGCACTGTC |
| | | | | | | TGTATGTATTTAGGGGGATGTTTAAGATC |
| | | | | | | CCAGTC (SEQ ID NO: 949) |
| 39 | CTCGG | 59.508 | 457 | 187 | 270 | CTCAGCCATGTCAAGCAAATCATTCAAGC |
| | AGATT | | | | | AAAATCTAGCTGAAAAGTCTGAAACATTCT |
| | CTGGT | | | | | TAAAAGCTTTGTTGTTATTCTAAGTCAGCC |
| | TGGCC | | | | | AAAATCCTGGTATCCCTCTTCCAGATAAA |
| | (SEQ ID | | | | | GAGCTCCCACTGAGAATTGTAGTCTATGG |
| | NO: 859) | | | | | ATTTTACCTTGACTGCAATTGTCTTTCCTT |
| | | | | | | CCTATCTGCTTGTTGTTTGTAGGTTCTTTT |
| | | | | | | TTTGTTTTTCTCAAATGCTAGTGATATTTTG |
| | | | | | | TTTACAGATTCTAAAAGCAATGCAAAATTC |
| | | | | | | TGTTGGCTTTATTTTCAGCAGAGTTAAAAC |
| | | | | | | TGATTTCATCATATTATCAGTATGTCATCTT |
| | | | | | | TATATTTATGACTGACATCTGCTATTCCAG |
| | | | | | | TGTTTATTGGAGACTTGTGAATGAATCTGT |
| | | | | | | CCAGGACACTTGTCAGTTCCTACCTGAAT |
| | | | | | | CTCTTACCTATTGAGATTTGGCCAACCAG |
| | | | | | | AATCTCCGAG (SEQ ID NO: 950) |
| 40 | CACTG | 61.508 | 451 | 290 | 161 | ATGTTCCAGGCGCCACGTAGAAAAGTAAA |
| | CATTC | | | | | AACAAAAAACAAAAAAGGTGAACTTAATTT |
| | CAGCC | | | | | TAATACTGTATTTTATTTAAACCAACCTATC |
| | TGGGA | | | | | CAAAATCTATCATTCTAGCATATAACCAAC |
| | G (SEQ | | | | | ATAAAAACTATCCTTGAGATATTTTACATA |
| | ID NO: | | | | | CTATAATATACTATGTAGTATATATAATATA |
| | 860) | | | | | CTATATACTATTTTACATACTACAGTATACT |
| | | | | | | GTAGTTGTTCATAGTATATCTTCAAAATCT |
| | | | | | | TGTTCTTTACATTTACAGACGATCTTAATC |
| | | | | | | AGACACTAAAGTTTCAAGGTCTAAGGTAA |
| | | | | | | ATATAGTCGTAGCAAATCAATAAAGTAAAC |
| | | | | | | TTGATATGAAATTATTTTTTACTGTATCAGT |
| | | | | | | TTGG |
| | | | | | | TTTTTTTGTTGTGGTGGTTTGTTTGTTTGTT |
| | | | | | | TGTTTGTTTGTTTGAGACAGAGTCTTGCTC |
| | | | | | | TGTCTCCCAGGCTGGAATGCAGTG (SEQ |
| | | | | | | ID NO: 951) |
| 41 | GCTTT | 61.508 | 356 | 137 | 219 | CAACACAATTCAGCCATGTTCTTTGTCCCT |
| | GGGAG | | | | | TTATAATAAGGATTGCCTTTCCTCAGGTTT |
| | GCCAT | | | | | CTCATAACATGTTCATTTCCATCTGAGGC |
| | GGCAG | | | | | CTCAACAGAAGCACCTTTAATGTTATTATC |
| | A (SEQ | | | | | TTTACCAACAGTCTCCTCAAGACAATGGA |
| | ID NO: | | | | | GATTTTTTTTCTATAAAGTGCCTCAAAACC |
| | 861) | | | | | CTTCCAGCCTTTATCCATAATTCAAATCCA |
| | | | | | | AAACCACATCCACATTTTTAGGTATTTGTT |
| | | | | | | ATAGGATCTGCCATTTAAAAATATTATTATT |
| | | | | | | ATTTTTGTATAGACAAGTTCTTACTATGCT |
| | | | | | | TCCTAGGCTGGTCTCAAACTTCTGGTCTC |
| | | | | | | AAGCAATTCTGCCATGGCCTCCCAAAGC |
| | | | | | | (SEQ ID NO: 952) |
| 42 | GAATG | 59.258 | 452 | 145 | 307 | TAGGGGGCACCTGTGCCAGTTTGTTACCT |
| | CCCAC | | | | | GGGTACATTGCATCATGCTGAAGTTTTTG |
| | TCTCA | | | | | AGATACAATAGATCCTATCATCCAGGTTG |
| | CTAGT | | | | | TGAGTATAGTGCTCAGTAGTTTTCCACCC |
| | CC | | | | | CTTGACACCCTCTTTCCCTCTTTCTCCTAG |
| | (SEQ ID | | | | | TAGTCTGCAGTGTCTATTTTTGCCATCTTT |
| | NO: 862) | | | | | GTGTTCATGAGTAACCCCAATGTTTAAAA |
| | | | | | | CCTACTTATAAGTGAGAAGATGCAGTATTT |
| | | | | | | GGTTTTCTGTTCCTGCATTAATTTGCTTAG |
| | | | | | | GATAATGGCTCCAGTCCTGGGAGCATTTT |
| | | | | | | GGCGGAGTCTTTAGGGTTTATTAGGTATA |
| | | | | | | GTATTATATCATCCACAAAGATGGTTTGAA |
| | | | | | | CTCTTTTCCTATTTGAATGTTTTTTATTTCT |
| | | | | | | TGTTATCTGATGGTTGTAGCTAGCAGTTC |
| | | | | | | CATCACTATGTTGAATAGGACTAGTGAGA |
| | | | | | | GTGGGCATTC (SEQ ID NO: 953) |
| 43 | GCTCA | 61.508 | 395 | 130 | 265 | GGCCATCCCTCTACTCCTGGTCTTTAAAG |
| | GGGGC | | | | | AATACACCACACAACATTGATTTTGTTCTC |
| | TGCCA | | | | | ATATTAATCACTCAGCCTTCACAGGAACA |
| | TGAGT | | | | | CTACTGGATGTGATCTCTCAAAAAGACTC |
| | A (SEQ | | | | | AGCCCTAGCTATCAACTCAAGTGCTGTCA |
| | ID NO: | | | | | GTAGTATCCATTGGACCCATAGAAAAATA |
| | 863) | | | | | TAGACATGCTGTTCCAGCAAGTCTCTGGA |
| | | | | | | AATGTATGAAACTCCTTTTGCTGGTCTCTC |
| | | | | | | TGCTTTCCTCGCTGTTTTGGGCTGTTTCA |
| | | | | | | ACCATGCTTGGCCCTTCATGTTTTGCAAA |
| | | | | | | CGATAACAATAACTAGGCATCAATCTCTTT |
| | | | | | | ACTTACCAAATCTAGGACACATAGGTCAA |
| | | | | | | ATTCTCCCTATATGCTCTCACTCTACTCAT |
| | | | | | | GGCAGCCCCTGAGC (SEQ ID NO: 954) |
| 44 | CTTCT | 60.298 | 428 | 160 | 268 | GAAGATCAGTCACTTGGCCTCTGGAGATT |
| | GCACA | | | | | CAGAACATAGGTTAAGCAATTTGAGACGC |
| | GTCAA | | | | | ATAGGAAGAGAACTTGGAGAATACCAATA |
| | GCTTT | | | | | TTTTACAGAATAGGCATAGAGAGGGAAAA |
| | TAACC | | | | | ATCATTAAGGAAACTAATAAAAACTACTCT |
| | ACG | | | | | ACAAGGTAAGAAACAAATTATAGAAAAAG |
| | (SEQ ID | | | | | AATGTAGTATCATAGAAGGCATTAGAAAA |
| | NO: 864) | | | | | GAGCTTCAAGAAGGAAGCACTGGTTAGC |
| | | | | | | AGTACCAGATATCCAAGAAATCTAGTAAG |
| | | | | | | ATGACAACTGAGAAGCCAATTGCATTTGG |
| | | | | | | CTATGTGGAGGTTACTGACATTTATGAAG |
| | | | | | | GCAGTTAAGTTGAGTGGGAAGGGCAGAT |
| | | | | | | TGTAGTAGGCTGAGGAGAATTAGGGAAT |
| | | | | | | GAAGAAGTAAAGACAATATAAACCACGTG |
| | | | | | | GTTAAAAGCTTGACTGTGCAGAAG (SEQ |
| | | | | | | ID NO: 955) |
| 45 | GGCAG | 61.508 | 368 | 127 | 241 | GGGCAGAATGGTCACCCAGCACTTGAAG |
| | ACTAG | | | | | ATCTCATCACACAGATAGCAAAGACCCCA |
| | GGCTG | | | | | TCTGGATGAGTTGATAGATAACAGAGGAG |
| | CACCT | | | | | CTGTCTTTGACCTTTGTCTCAAAACAACTC |
| | T (SEQ | | | | | TGTATTTATTTCCTAGGTAAAAACATAAGT |
| | ID NO: | | | | | GTCGCCCTCCTGTTCTCACCCATTTCTAC |
| | 865) | | | | | TTTAGGCTAGACAGAAAGTT |
| | | | | | | CTTACCTTCTTTGCTGGGTTTTTTATTTAC |
| | | | | | | CATGAGACACAACAAGGCAGAAATCTCTT |
| | | | | | | TAACATGCAGGCGTGATCCCCATCCTGTC |
| | | | | | | TTCAGAGTTGGCTGAGGGATCCCAGGCT |
| | | | | | | GATCTGATTTCTTTCAGACCTACAGAGCC |
| | | | | | | CATAAAGAAGGTGCAGCCCTAGTCTGCC |
| | | | | | | (SEQ ID NO: 956) |
| 46 | GCCTT | 61.508 | 399 | 132 | 267 | GTGCATTCAGGAAGCTTCTGTTTGACCAT |
| | GGCCT | | | | | TCATGTGTTTACAGATGTTAAAGGCATGG |
| | CCCAA | | | | | GTAATTAAAGTTAGCAATACCAAAATTTCT |
| | AGTGC | | | | | GGATTTGCACAAGTTATGAAAATGTCATTA |
| | T (SEQ | | | | | AATTCTTGATAAGGGTGTTGGTTGCAGAG |
| | ID NO: | | | | | TGTTTCTCAGAAAATATCTGTCTAGGAGA |
| | 866) | | | | | GAAGGAATGAAAAATTTTTAATAATTTTATT |
| | | | | | | TCAAAATAAAATATACATAAAGTTCCCAGA |
| | | | | | | GCAGCTGGGCTCAAATATTAATTCCTTCC |
| | | | | | | TTCCTACCAAGTTGCCTCCATTCTATATCT |
| | | | | | | ATCATTAATAGACAGCTGACCTAATAATTT |
| | | | | | | TAGTGGTTTCAAATTATATAGGCCGGGTG |
| | | | | | | TGGTGGCTCACGCCTTTAATCCCAGCACT |
| | | | | | | TTGGGAGGCCAAGGC (SEQ ID NO: 957) |
| 47 | CCATT | 60.908 | 406 | 152 | 254 | GCAGGAAGTGCCAGGACATTGAACAGAG |
| | AGGTA | | | | | CTCTCAAGTGAAGCTATTGTAAAATTTCAC |
| | TGCTT | | | | | TTCCTTCCTCCTTTGGCTTTCTAACTCCCA |
| | CCCAG | | | | | TGCTCTCCCAGAATGAGAGCTCTGGAAG |
| | GGAG | | | | | ATTTTGACTTCTTCCTTCTCTCTTTCCCTTC |
| | (SEQ ID | | | | | ACCCCTACATCAAGATTTTGTTTCAGAAAA |
| | NO: | | | | | TCTAATACTTTCATCTCTAGACTATTATCAA |
| | 867) | | | | | AAATTCCATGTCAGTATAGAGCTACTAACA |
| | | | | | | CATGTTACCCATTTCCAGACATTTAGATTA |
| | | | | | | ACTCTATATAATAAACTAAGTTTTTTGATCA |
| | | | | | | GCACCTTCTCAATTCTTCTGTTATGAAGTT |
| | | | | | | TTGGTTCTGGTGTTTTGTTTGTTTGTTTAG |
| | | | | | | GTTGGTGTCCTTTCTTCATTATTCTCCCTG |
| | | | | | | GGAAGCATACCTAATGG (SEQ ID NO: 958) |
| 48 | CAAGC | 60.908 | 418 | 169 | 249 | GCTGGAGGTGATGGCCAAGGTTCTGTTC |
| | TCCCT | | | | | TTCACTCTCTTAGAAGTGATGGTGTCACT |
| | GGTGA | | | | | CTGGGTAAGTCCCTCACCCTCTGAGCCT |
| | TTCAC | | | | | CATTTGTAAAATGTGAAAATCAAGAGAGG |
| | ATCC | | | | | CCCTGGTCCTTAAGGATCTTAAGGACTTT |
| | (SEQ ID | | | | | ACTAATGCCTTTTCCTCCTCTGGTCACAA |
| | NO: 868) | | | | | CATTGCAGAGACTTGTGCTGTCAAGGATA |
| | | | | | | CTGACTAGTTAAGATTCTTACTGCTGAAG |
| | | | | | | CTGCTTTGGGGAAGGACACATTTCCTGG |
| | | | | | | GAGAGCATGTCAAGCTGAAGGTCATCATA |
| | | | | | | CCAGGAAAAACAGGAGAAATTATCATATC |
| | | | | | | AGCAATAGGAAGGCAAAGTAAGGGTGTA |
| | | | | | | GGGTGTAGCCTAGATATTGCTGCCAAAAA |
| | | | | | | AGACAGGCCTCCAGTGCCTGTGGATGTG |
| | | | | | | AATCACCAGGGAGCTTG (SEQ ID NO: 959) |
| 49 | CCCAG | 60.908 | 427 | 156 | 271 | CCCAGTACTCCCACACTCTGCCTTCTTGC |
| | CTTGA | | | | | AAAGTAGATGGATCACTTCAATCCATCCT |
| | CATTT | | | | | CACTTCCTGGACCTCGCTACCTCCCACTT |
| | CCCTT | | | | | AGACTACTGATTGCAACAGTCTCTTCATTC |
| | TGGC | | | | | ACTCTTCCCATCCTACACTCTCGACCCCT |
| | (SEQ ID | | | | | CAAATCTATTCTCCACCCTGCAGAGTGTT |
| | NO: 869) | | | | | TTTCCTAACTGTATTAGTCTCCTATTTAAAA |
| | | | | | | TCCTTCTGTGGCTTCCACTTCAACCATCA |
| | | | | | | GGCTCTTCTAAGTTCATTTTGATAGCTATG |
| | | | | | | GGAAGCCTACTTTGACTTCATTCTCATTTC |
| | | | | | | TTCTCTAGGTTCCCTTCTGGTAGCTTCCC |
| | | | | | | ACCCTGAGCCTACATTCACCATGTCTGTT |
| | | | | | | GTATAGACTTTTTGAAAGGCAAATGAATCT |
| | | | | | | CAGGACCCCAAAATCACTAAGCCAAAGG |
| | | | | | | GAAATGTCAAGCTGGG (SEQ ID NO: 960) |
| 50 | GGAGG | 59.148 | 544 | 225 | 319 | GTCCAGGACAAAGCTCAGTAGCCTTTCGT |
| | AGGTT | | | | | AAGCAGCAGCCAACAATGCAAGAAAAGC |
| | GGTAA | | | | | AAGTGAATGAGGTAATGGATTTCTTTTCC |
| | AACTC | | | | | CTTATTCCACT |
| | CAC | | | | | AGAGAGCAGTGTTCTTTTGTACAAATCAG |
| | (SEQ ID | | | | | GTAGGTTGTTTGCTGCAAAGAACCTGTAG |
| | NO: | | | | | AGAAAATCTACATTAGGAGAGGTTTTATTA |
| | 870) | | | | | GCAGGAGAAAGGTCTCTTGCATAAAACTC |
| | | | | | | TGCATTCTGAACAAAAGGTGAAGACAGTT |
| | | | | | | TTTTCCAGCCAACTTGCTCTTATTGATGTA |
| | | | | | | GGTATACCTCTGATACCTTATTTTCATATG |
| | | | | | | GAAAAGTGTTGGTTATTCAAAAATATAACA |
| | | | | | | TGAAAACTATAGATTACATTCTATAGTAAA |
| | | | | | | TTTTTCAGATGGCAATCCTTTGCCAAAACA |
| | | | | | | GATCTGTCAGTAACCAACTATTAGTTATCT |
| | | | | | | TTATGGGTAATACAAAAATATTAATAATTTT |
| | | | | | | TTTAACAAAAACTCCTAAACAATTCAGGAG |
| | | | | | | CAAAAGAAAGAGTGAAGAGAAGGAATTTA |
| | | | | | | TGTGTGTTGTGGAGTTTTACCAACCTCCT |
| | | | | | | CC (SEQ ID NO: 961) |
| SIRT6-DdCBE | | | | | | |
| 1 | CTGTT | 61.288 | 372 | 126 | 246 | CAGCTGGCCAAGCAGGGATCACGTCCCT |
| | GCCTC | | | | | CTGCCTTGGCCACTCCAGGCCACCTGCA |
| | CTTGG | | | | | GAGGGGGCAGCCCTGTCAGTGATGGAG |
| | GTACA | | | | | GGGGAGACAGCCTGTGTTATTCACGCCG |
| | GC | | | | | GAAGTCCATGGCATTCTCAGAGAGCTCTT |
| | (SEQ ID | | | | | CCCCGTACCTCCCCAGAACACTGAGAAT |
| | NO: 871) | | | | | GGATGAATCAGTCCCGGCTCATCAGAGC |
| | | | | | | CTTTCATGCTAAACCAGCCCAAATGACTG |
| | | | | | | ATTTAGAAACTGCGTGGTCTTGTTCTTTGA |
| | | | | | | GTGGATTTCTGAGGCACACTCCAGAGCA |
| | | | | | | GGCCCAGGTCTTCATTATCTCCATGCACA |
| | | | | | | CCCTTTGATTAAGCATCTGTGACCACACA |
| | | | | | | GCACTGTGTGCTGTACCCAAGGAGGCAA |
| | | | | | | CAG (SEQ ID NO: 962) |
| 2 | CTTGG | 61.508 | 327 | 125 | 202 | GGGGGAGTCGGACTTAGAAGGTTGCCTC |
| | CACAC | | | | | TGCTGCTCTCCCACTAAGAACAATGCAGC |
| | AGCAG | | | | | TGCCCAGGAAACACACCCGAGCTATGAA |
| | GTGCT | | | | | TAGGCTCAAGCACACAGGGCGAAGCTGT |
| | C (SEQ | | | | | CGCATTTCTGCCGTTTAGAAAGGATCTCT |
| | ID NO: | | | | | AGTGTGAAGTTGCTTGGAGGCTCTGATTT |
| | 872) | | | | | TGCAAACCCAATTAAATATAGATTTCTTTG |
| | | | | | | GGGTGACGGTTGGGAAGGGTGTGGGTG |
| | | | | | | GAATGTATGTCTGTGCTGCAATGCAATTT |
| | | | | | | AATCCTGAAAGTTTCAGCAAACCTATTCAC |
| | | | | | | ACACTCCATAAACATTTCTGAGCACCTGC |
| | | | | | | TGTGTGCCAAG (SEQ ID NO: 311) |
| 3 | CCCCA | 61.508 | 411 | 259 | 152 | TGCTAGGCCCCGATTTGTGGACACTGAG |
| | CTTCC | | | | | CTAGGCAAAAGGATATATAAAGAGATGCA |
| | TTCCT | | | | | AGCTAGAGGAGGGGAAAGTTCTGGATGG |
| | CACCC | | | | | GGACCTCATTGGCCTCCTCACCTCTGTAG |
| | T (SEQ | | | | | ACCCACGTCTTGGGTTGACCCAGGGTAG |
| | ID NO: | | | | | AACCCTATAAGGATTTGTTCAATAAACGAA |
| | 873) | | | | | TGCATAGAGACTGATCAACAACTGACAAA |
| | | | | | | GTGGTATTTTACAGATGCCGTGAAAGCAG |
| | | | | | | CATACAAGCCGGAGAGCCTACTGGAAGC |
| | | | | | | AAGAGGGGAAAACCCAGCCGGGTATGG |
| | | | | | | GGGCTGCGGGGAGGATGCCAGGTGGCG |
| | | | | | | GAGACTGGATTCAGGATTTGATGCTTGAA |
| | | | | | | CTGAACCTTCTTTTAAGAGGTGAGTGGGC |
| | | | | | | TGGGAGGTTGTGATGCCCAGAGGGTGAG |
| | | | | | | GAAGGAAGTGGGG (SEQ ID NO: 312) |
| 4 | GCTCT | 61.508 | 334 | 205 | 129 | GACCCTTCCATTAGATCTGAGGGGGGGG |
| | GGCTG | | | | | TGGGAGGGCAGAGGAGGGGAGGACAGA |
| | GAGCA | | | | | GAAGTGGGAGGAAGCAGGAGAGGGGGT |
| | CAGGA | | | | | GGAGGGGTAGGGGCACAGTGTCATGCCT |
| | A (SEQ | | | | | CTCGGGCTTCCCCCACAGGGTGAATGAC |
| | ID NO: | | | | | TGTGTGCTGCGGGTGAATGAGGTGGACG |
| | 874) | | | | | TGTCGGAGGTGGTACACAGCCGGGGGG |
| | | | | | | TGGAGGCGCTGAAGGAGGCAGGCCCTG |
| | | | | | | TGGTGCGATTGGTGGTGCGGAGGCG |
| | | | | | | ACAGCCTCCACCCGAGACCATCATGGAG |
| | | | | | | GTCAACCTGCTCAAAGGGCCCAAAGGTG |
| | | | | | | CGGCCCTCCAGGTTCCTGTGCTCCAGCC |
| | | | | | | AGAGC (SEQ ID NO: 313) |
| 5 | CCTCA | 61.508 | 379 | 229 | 150 | GTGTACCCCAGAGAGAGCCGAGCCTCTC |
| | GCCTC | | | | | TTTGCAGAGGCGGTTTCCCTTCTGTCTGC |
| | CACAT | | | | | CTCGATCACTGCACTGGCTGGGAGGGCT |
| | CTGCC | | | | | TTGCGTGGTTTACACCATGCAACACGTTT |
| | T (SEQ | | | | | TCCATCTCAGCATCTTATGCGCTTAAGCA |
| | ID NO: | | | | | GCGGTTGGGCGTTAGCCCTGCTCAGGCC |
| | 875) | | | | | TCCAATGCTAACAAAAACAGGGAGAGCCT |
| | | | | | | CCATTCACCCCCCAGGGCCTCGTGTGCA |
| | | | | | | GGGACAGGCAGCCCCGACGCACTGCTG |
| | | | | | | TCGGCCACCTCCTGGGTTAGAAACTGCA |
| | | | | | | AGGCCTGATGTGGGGCCTTCCCAGCTTC |
| | | | | | | CAGGGGGCTATGTCCTTATCCTGAGACC |
| | | | | | | CCACAGCCAGGACCGCAACAGGCAGATG |
| | | | | | | TGGAGGCTGAGG (SEQ ID NO: 963) |
| 6 | GTCCA | 61.288 | 350 | 126 | 224 | CCTCAGGTGAGAGCACAGCCTTGGGGAC |
| | AGGTC | | | | | ACAGCCTGGGGCCTTGTGGCATGCCCCA |
| | ACAGA | | | | | GCAGGTGCTGGGGTCGGGGGTGAGCTG |
| | GCTGG | | | | | GAATCTGGGGTAGGTACCTCAGCCGGGG |
| | AG | | | | | TGTCATAGTCCCTGAAAGGAGGGAGGCT |
| | (SEQ ID | | | | | CTCCTGTGTGATGGGGAGATGAAAGCCT |
| | NO: | | | | | AGGCGACGGGGTTTGAGGGATTTCAGGG |
| | 876) | | | | | ACCGAGACAAAGGGGATGAGGGAGGGG |
| | | | | | | AGGAGACCTGCAACAATCTAGAACTACCT |
| | | | | | | CCTGCCCTTCCCCCATTGTGGAGATTACA |
| | | | | | | CAGACTCCAGAGTCAGCACAGCTGGGTA |
| | | | | | | CAAATTCTTAACACTCTGCTCTCCAGCTCT |
| | | | | | | GTGACCTTGGAC (SEQ ID NO: 964) |
| 7 | ACCAC | 61.508 | 333 | 208 | 125 | GGATCCAAGGTGCCTTCACCCTGCGGCC |
| | AGAGC | | | | | TGCTCTATGAGGGCCTGCGTCGCACATC |
| | CTCAC | | | | | AGCTGTTGGTATCCTCACCTCGCTGAGCC |
| | CCACC | | | | | GTTCCTCCGAGTGTGCTCTGTGGCTTGCA |
| | A (SEQ | | | | | CCAGGCCTAGCTGGGCCTTGTGTCTGGT |
| | ID NO: | | | | | CTCATCCAGCGTCTTCTGATTGTGGGGAA |
| | 877) | | | | | TGAGGCAGAGGTCTCCCCACCTGGGCTG |
| | | | | | | TCCGTGTGGCGAAAGCCTTCCGGGGGGA |
| | | | | | | GGGAGAGGAAGTGCCTCTACAAGGGCCT |
| | | | | | | AGAGTCGTCCTGTGGCACTGAGGGCTCT |
| | | | | | | GGCAGCTGCACACAGGTTGATAATGTCA |
| | | | | | | CTGGTGGGTGAGGCTCTGTGGT (SEQ ID |
| | | | | | | NO: 965) |
| 8 | CAGGC | 61.508 | 403 | 251 | 152 | GCTGGATTCGATCTGAGGTCAGCTTGACT |
| | CCTAC | | | | | TTTCCTTCAGGATGATGCGCTGCTTCCTC |
| | TGGGA | | | | | TGATGAAGGATCAGGGATGCAGAATGGG |
| | CGAAC | | | | | ACTGATGTATCTGTCCAATCATCCCACTC |
| | A (SEQ | | | | | ATTCTCCTCACTTTGCATGCTCTTCTCGG |
| | ID NO: | | | | | GGCCATCTACAGACAGGTGAGGGGCCCC |
| | 878) | | | | | AGGCAGACAGCTCCTTGGGACACTGAGC |
| | | | | | | TCCACATTGAAATGTTACTCAAATGAATGC |
| | | | | | | GCAGAGGAGCTGTGAGTGAGAAAGTAAG |
| | | | | | | CCCTCCAGCGTGAAGAGCCCCGGAAAAG |
| | | | | | | CCACCCTTGCTCTGGCACCTGTCATGCA |
| | | | | | | GCCCTCACAGCAGTACTCCCATGGGGTA |
| | | | | | | TGGGAGGACAGGGGCACTTCTGTTGGTC |
| | | | | | | TTTCCTTCCTCATGTTCGTCCCAGTAGGG |
| | | | | | | CCTG (SEQ ID NO: 315) |
| 9 | CTCTT | 61.088 | 343 | 215 | 128 | CCCAGGACAAAGTTGCTTTGGGGGGCTT |
| | GCACA | | | | | ACAGGTTGAATCACCCATAGCTATGTTTT |
| | AGGTT | | | | | GTTTGGCTTGTACTGTGTTGTTTACATTAT |
| | GCCAC | | | | | TTTATTAGTTGGCAATAGCTTTAAATCAAA |
| | CTC | | | | | ATTTACATTAAGGTCCAGATTTGGGGCTC |
| | (SEQ ID | | | | | CTCTTAAAAAAATAAATCAGCACATCTACA |
| | NO: 879) | | | | | ACAGTAGGATTTTCACGCCCAATGGCAAA |
| | | | | | | ATCTGTTAAAGCTGTGTGACAGCTTCTCC |
| | | | | | | TTTTAATGGAGATGACCTCTTCAGACCCT |
| | | | | | | GTACTCCAGGTGCCACAGGAACCAGCTG |
| | | | | | | CC |
| | | | | | | CGGTTCATCCTTGTGTGTTACCTGCATGA |
| | | | | | | GGTGGCAACCTTGTGCAAGAG (SEQ ID |
| | | | | | | NO: 316) |
| 10 | ATTCC | 61.508 | 473 | 280 | 193 | GCCTCGCCAAGAAACGCCCATTTATTTCC |
| | GGGTA | | | | | TTCCTATTTATTTATTTTGCAAAAGCCGCC |
| | GGCGA | | | | | TTTTGAAAGCCGGAGTGCAGTGCGGACT |
| | GGAGG | | | | | GGCTGAGGCCGGGGCCCAGGCGCGCG |
| | T (SEQ | | | | | CCTCCTTCCTGCAGGGGGCCCGGGGCAT |
| | ID NO: | | | | | CGATCGGGGGGGGCGTAATGAACCCTAA |
| | 880) | | | | | TAACAGCTCTATCACCGCCCGCCCGCCA |
| | | | | | | ATTGGCCCGGGTGCCCTCCAAATTAGCC |
| | | | | | | ACAAAGAAGCCAGTCTGTCAATATTAATTC |
| | | | | | | CGCCGCGGAGATTACTTGTTGTGGGAGA |
| | | | | | | ACAAAGGTGTTCTGGCTTGAGCTGAACAA |
| | | | | | | CTTAACTCCTTGTCTCATAAAATTTAAGCT |
| | | | | | | GCTATTGATCGCCTCCTTGCATTGTGTGA |
| | | | | | | GGATTAAACACGTGCGCGTGCACATCCA |
| | | | | | | GGCACACGCGCGCACACACTCGGGGGG |
| | | | | | | CCCGGCCCCGCTCAGGCAGCCGCCCCA |
| | | | | | | CCTCCTCGCCTACCCGGAAT (SEQ ID NO: |
| | | | | | | 317) |
| 11 | AGGGC | 61.508 | 327 | 202 | 125 | CCAGCACACCCTGATAAGCAGGATTCAG |
| | CCCAG | | | | | ATTGGGCATGGGACAGGACAAAGGCTCT |
| | TGAGT | | | | | GAGGAGGCATGAGTGGAGTAGTAGAGAG |
| | GTGTG | | | | | AACACAGGACTCTGGGTTCTGAGCCAAG |
| | T (SEQ | | | | | CTCTGCCATCCTGCAGCCATCTGACCCCT |
| | ID NO: | | | | | GGCCAGGCCTTCCCCCAACTTCCTCAGC |
| | 881) | | | | | TGTGAAACGCGGCAGGGCTGCAGATGAC |
| | | | | | | GTAGGTGGGCAGAGGCCCTCTGGTGCCT |
| | | | | | | ACTGCTAGACACCCTTCTACTCTGGTGGG |
| | | | | | | AGACCTTGTGCTCAAACGCTCTCAGAAGT |
| | | | | | | CAGGGCAGTTGGGAGTCCAGGTCACACA |
| | | | | | | CACTCACTGGGGCCCT (SEQ ID NO: 318) |
| 12 | GCCCA | 61.508 | 358 | 141 | 217 | CCAGGGCAACAGGTTTAAGACCCATTAG |
| | CATCA | | | | | GAGACAATATTGTCGTCATGAATATAAATG |
| | GCTCT | | | | | AGGCCTAGGCAGGTTGGGAGTAGCTAGT |
| | GCACC | | | | | GTCTTGGCTCTGGCACAACCAGGCCCTG |
| | A (SEQ | | | | | TTCCTCCACAGGGCTGGCCAGGGCAGAG |
| | ID NO: | | | | | GTGAAAGGGGCTGGGGTGTGACCGAGT |
| | 882) | | | | | GAGCTGGGGTAGAGGTAGAAAAAGGGAC |
| | | | | | | ACAGAACATCCCAGGCCTAAGCTACATG |
| | | | | | | GAGTATGAGAGAACAGCTGGAATGTGCT |
| | | | | | | CTAGAAGCCCTGGGAGAAGGCCTCAGTT |
| | | | | | | GAGGCTGAATTCAGATATGCCTGGGACC |
| | | | | | | CGGTCTCTGTTAAGAGACCCCGGAGAGC |
| | | | | | | TGGTGCAGAGCTGATGTGGGC (SEQ ID |
| | | | | | | NO: 319) |
| 13 | CAGCC | 61.288 | 442 | 132 | 310 | GGTCTCGATGTGCTCCGCATGAGTGGCA |
| | TTCAC | | | | | TCCGTACCTGGAAGCCACTTGCTGGTTAC |
| | TGCAG | | | | | TCTGAGGTAATACAGACAACAGCTCCACC |
| | TT | | | | | CGGGTGGCGCATGGGCACCTTGCTCACC |
| | (SEQ ID | | | | | CCGGAATCCCTCCTTTGCCTGGACAGCC |
| | NO: 883) | | | | | TATGCAGGTAAGATGCCTTCATTTCATTCC |
| | GCTCC | | | | | CATATAGCTCATTCAAGAAATCACAATGG |
| | | | | | | CAACCTCAACTCTCTTGTTCCCTCACATC |
| | | | | | | CCATTACTCAGGAAAGCTGTCAATTCCAG |
| | | | | | | CTTCAAAGCTCTTTTTAAAAATTCTCTTCC |
| | | | | | | CCATGTGTCCAAGCCATACTTGCAGCTTG |
| | | | | | | TGTCCCTATTTCTAGTCTCTTCCTCTACCC |
| | | | | | | TAACCATTCTTTAAGCTGTGGCCAAAGGG |
| | | | | | | ACCTTTCAAAATGTAGCTCTGCCATGAAG |
| | | | | | | GAAATGCAAATTAAAACTGCAGTGAAGGC |
| | | | | | | TGGGAGC (SEQ ID NO: 966) |
| 14 | CTCTC | 61.508 | 408 | 159 | 249 | CCATCACCTGCCTCTCCCTGTCTATTGTG |
| | CTCCC | | | | | CTATTCAATGAAACATCATAGAGAGGATA |
| | CAGCA | | | | | GATGTGATTCAGCATCTGGCATATACCTG |
| | GGGTT | | | | | CTGTAGATGCTGTAGAACAGATTCTCTGC |
| | A (SEQ | | | | | AAGTGCTTGTTAATGTAAGTTCTCTCCGC |
| | ID NO: | | | | | AGAACCTCATTCTCTTGAGACAGCAATGC |
| | 884) | | | | | TGAGAAAGCAAATCTGGGACTGGGGCTG |
| | | | | | | TGATATATTCAAATTTGACAGCCTC |
| | | | | | | ATCCTCCTCCTAGGTGATTCTGATGTCAG |
| | | | | | | TGGTCCTGAGGCCATATTTTCAGGAATAC |
| | | | | | | TGCCTTAAAAGTCATTATTATCCAACCAAC |
| | | | | | | GAATTCTTACTCTGTAGGCAACTAAAGGT |
| | | | | | | TGACCCTTCCCAAGGGTCACATTTTAATG |
| | | | | | | GTGTGTTTCACTTTTAACCCTGCTGGGGA |
| | | | | | | GGAGAG (SEQ ID NO: 967) |
| 15 | GAAGG | 60.298 | 474 | 160 | 314 | CTTGGTGTGTCTCTTCCTGCACGTAAAAT |
| | ATGTG | | | | | TTCATAGAGAAATATAACAGCCTCCCTCAT |
| | GAAGC | | | | | CTTCCTGTCTGATTAATTTAAGAATGCCAC |
| | ACTTG | | | | | AATTTTCTTGGAATAGCCTCTTGGTGATGT |
| | AAATT | | | | | CCTAGCCTCTTCTTATGAGGGTGAGTTGT |
| | CCC | | | | | CAGGAACTAGGATTTCACCGAGGCCTTA |
| | (SEQ ID | | | | | GGGTGTGAATGAGGAGGAGAGTCTGCTG |
| | NO: 885) | | | | | GAAATGTTTCTAATAAAGAAGGTAAGCAA |
| | | | | | | AGGTCAGTGACTTCTCTGTAGTCACCAAC |
| | | | | | | ATGACCTGTAGCCTACTTATTAATGTGGTT |
| | | | | | | CACAATATTTAAGAAATGAGTCATATATGA |
| | | | | | | TGAGGAAACCCTTGTTCTTCAAGAGTTAC |
| | | | | | | CAAAGTGGTCTGGTTTTCCACTATTTTCTA |
| | | | | | | TTGCCTTGTGTTAAGAGTTTAAGATAGCAT |
| | | | | | | AATACTGTCAGAGATGTATTTGCATGTATC |
| | | | | | | TTTTAGGGAATTTCAAGTGCTTCCACATCC |
| | | | | | | TTC (SEQ ID NO: 968) |
| 16 | TGGGC | 61.508 | 363 | 142 | 221 | GGTAAAAGCACCCTGAGAGGGCATGGAA |
| | CTGGG | | | | | AAACACCAGGTGAGTTGGCCCCTAAGCT |
| | ACTAA | | | | | ACCAGGGGCATTAGTTCCAGACATCTCCT |
| | CCAGT | | | | | GCTGAACATGGAGGCAGGTGGGGTCCCT |
| | G (SEQ | | | | | GATTTCACCCAGCCTGGCTGTGATGCACT |
| | ID NO: | | | | | TCTGAGGGAGTCCTGTGTGAAGTGCACA |
| | 886) | | | | | GGGAAACCCTGCTCTCTCAGGAAGAGTG |
| | | | | | | AGGTATGGTATGGTCTGAATGAGGGGAG |
| | | | | | | CAGGGAAAGCTGCCAGACTCAGGCTCCC |
| | | | | | | AAGGAAAAGTTAGGACCCAGTGGGGAGT |
| | | | | | | AGGGACCTTGAGAAATGAGACTGGTCAG |
| | | | | | | AGGCTATGTTCACATCCCAGGCAATGTGG |
| | | | | | | GGCCACTGGTTAGTCCCAGGCCCA (SEQ |
| | | | | | | ID NO: 969) |
| 17 | GCCCT | 59.508 | 370 | 141 | 229 | CAGTCTCCACAAGTGACGGGAAATTGGA |
| | GCATC | | | | | ACCATGCACAAGACACCAAAAGCAGTGG |
| | TTAGC | | | | | ACAGTCCACCAGCAAAAAGGTAGTGCTCA |
| | CCTTG | | | | | GCAATGTGGCTTTCTCTACACAGGGGATG |
| | (SEQ ID | | | | | GCTCAGCGACGTGGCTGTCTTTACATAG |
| | NO: | | | | | GGGGTGGCTCAGCGGCGTGACTGTCTCT |
| | 887) | | | | | ACACAGGGGATGGCTCAGCGATGTAACT |
| | | | | | | GTCTACACAGGGGGGGGCGTTTCCTTC |
| | | | | | | TCGGAGTATTAGCGCTTAGTTGACTGGAG |
| | | | | | | TATTAGAGCAGTGTGGTTCACAAATAACT |
| | | | | | | CAAAATTGCAGTTAAAATAAAGTGAACTAA |
| | | | | | | AATATTCAAAAATAGATTTAGTGTAAAGTT |
| | | | | | | TATATGCAAGGGCTAAGATGCAGGGC |
| | | | | | | (SEQ ID NO: 970) |
| 18 | GCCCC | 61.508 | 341 | 125 | 216 | AGGGCAGCAGGTGAATGCGCATCTCAGA |
| | AACAT | | | | | GAGCAGCCGGGTCACCCGTGGGTTCCCT |
| | CACCC | | | | | CGCAGGAACTCATGGCACAGGAACTGCA |
| | GCATC | | | | | TCAGGAGCAGAAGCAACTCCCGCCCCAG |
| | T (SEQ | | | | | GGCCTCGTTCCCATGCATGCCAGCCACG |
| | ID NO: | | | | | TAGCGCACCTCAGGCTCCCCTGGGGACA |
| | 888) | | | | | CATGGGGGCTTGCAGCGGGTTCATGCCT |
| | | | | | | GGGGCCCTGCCCTGTGCCTACCTCTCCC |
| | | | | | | CACTCCCCATGCCAGTACCCAGCTCATG |
| | | | | | | CTCCCCAGGCTTGTCCGACATTTCCATCA |
| | | | | | | CATACAGCTTCAGGCCCTGGTAGCTCTTC |
| | | | | | | CCAATGCTGTAGATGGGGGTGATGTTGG |
| | | | | | | GGC (SEQ ID NO: 971) |
| 19 | CCAAA | 61.088 | 345 | 217 | 128 | GGCCCTGGCTTGGCCTTAACTCTGCTCC |
| | CTAGG | | | | | AAAATCAGACTGGGTGCTGGGATCAGGG |
| | CCTTA | | | | | AAAGGGGGGCAGAGAGAGTAGGCATTT |
| | GGGCC | | | | | CTGAGCCTGCAGGGGAAGGGGTGCTTCC |
| | TAC | | | | | CAGGCCACGAGAGCATAGGAATGCCTAG |
| | (SEQ ID | | | | | ATCTGCAGCCATGGCCTAGGAGGGCAGA |
| | NO: 889) | | | | | GGTCCAGCTCCTCCAACTCA |
| | | | | | | GAAGGGGGCGGGGCTTCCACCTG |
| | | | | | | TCCCAGTCTCCTGCAGGCTCTGTG |
| | | | | | | GCATGAAAAGCCCCACTGTGTCTC |
| | | | | | | CCCCACTGCAGCTGGTGTCTTCAC |
| | | | | | | AGCAGTGGCTCTAGACAGGTCGC |
| | | | | | | TGCCATCAATAAATAAGTAGGCCC |
| | | | | | | TAAGGCCTAGTTTGG (SEQ ID NO: |
| | | | | | | 972) |
| 20 | AGAGC | 61.088 | 325 | 200 | 125 | GCCACTCCCCTTTGGTGCTGTGAC |
| | TGTGT | | | | | CTGCAGACCCATTCATCATGGACT |
| | GGCGT | | | | | TTTCCTCCTGCCTCAGAGCCCTTC |
| | GAACG | | | | | TCTTCATTCTACTCCAGCCCTCCA |
| | CTA | | | | | CCTTGGGGACCTAATTACCCACAT |
| | (SEQ ID | | | | | GAATGACCCGTCCGGTACCCCTG |
| | NO: 890) | | | | | CCTCTCACCACTTGACTTCCTCTC |
| | | | | | | CTTCCCTTCCCACCAGCTGGCCTC |
| | | | | | | TCCGTGTTCCCGTGGGACAGTCTC |
| | | | | | | GCCACCCAAAATTCCACCACACCC |
| | | | | | | CAGTACTTGGTTTCAAGCCACGCA |
| | | | | | | CCCTGACCACCATTCCTTATCCTT |
| | | | | | | CCAGCTTACTGGCTTTAGCGTTCA |
| | | | | | | CGCCACACAGCTCT (SEQ ID NO: |
| | | | | | | 973) |
| 21 | CAGGT | 62.768 | 351 | 138 | 213 | CCAGGAGAAGAAGTGGCATCCGC |
| | GCTGT | | | | | GGGGCAGGGCGGGCGGTGACGG |
| | TGAAG | | | | | CCGGCTCAGGTGGCGGCCCCACC |
| | GCGGC | | | | | CCAGCGCCCTTCAGCAGGCCTGG |
| | CAAA | | | | | GTCGGTCGGCCTCGGACCCCGTA |
| | (SEQ ID | | | | | GGCGCCGGCGGAGCTGGCGGCA |
| | NO: 891) | | | | | GGGACCCGACAGCTCTGCCGCGG |
| | | | | | | ACTCCGCAGGGGACATCCCCCAC |
| | | | | | | CCTGGCGGCCCACCCAGGCGGAG |
| | | | | | | CGCGGCGGGGACCGTGCATCTAG |
| | | | | | | CGCGCCCTGGTGACCTGCGGGCC |
| | | | | | | GAGGCGGGCTGTGGGGCTTGGCC |
| | | | | | | CCGCGACTCAGCCTTCCGGGCCC |
| | | | | | | ACAGCGGCCCTGACCCGGGAAGT |
| | | | | | | GCGGAGGTTTGGCCGCCTTCAAC |
| | | | | | | AGCACCTG (SEQ ID NO: 974) |
| 22 | CAACC | 61.508 | 338 | 131 | 207 | CCTTTGCAATGGAGGGCAGGGAGGGCAC |
| | TCCTG | | | | | CCTGCCCTCAGTCTGGCTCCTGATCTAAC |
| | CCTAC | | | | | ACCAGGAACCTCAAGTAGCCAAAATCCTT |
| | CTCCC | | | | | TAGGAGACAAGGTTCAGGTTTCACACAG |
| | A (SEQ | | | | | GCTGTCCTGTTTAGAGCAAATAAACAGCC |
| | ID NO: | | | | | CATTCGTGTATATTTTGGACCAGGTCTCT |
| | 892) | | | | | GGACTGCCCGGGGGCACCTTGCCACCT |
| | | | | | | GTTGTGCAACCTGCTTGTTGTGGAGAATT |
| | | | | | | AGGGAAGAACAATTCTAGAAAGGGGTCC |
| | | | | | | CAAGTCAGTTAGCTGAGACGGGGTATTG |
| | | | | | | AGAGTCCTTTTGGGATGCACTTCACATGG |
| | | | | | | ATTCTGGGAGGTAGGCAGGAGGTTG |
| | | | | | | (SEQ ID NO: 975) |
| 23 | CCACA | 60.058 | 434 | 263 | 171 | CAGGCCTAAGCCTTGATAGACAGAATTTT |
| | CAAAC | | | | | ATAAAATATTTTATATTTTCATTTGAAGAAA |
| | AAAAG | | | | | ATGTTATAAACACATAAGATTTGAAAACAG |
| | GATCT | | | | | TAAGCACAAAACACAACAATCTAAGGTGT |
| | CCTCT | | | | | TTTCAAGAGCCACATAAAAGGATTGAAAA |
| | TGAGT | | | | | TCAATTTGGCAATCTTTCTGAAGGGTAGG |
| | (SEQ ID | | | | | TATTTAGACAGAGTGCTTCCAGTGGCTGG |
| | NO: 893) | | | | | AAATCATTAGAAAGCCAAGGCAAGGTGCC |
| | | | | | | CATGGTCACGCAGAAGGGTCCCTGAAGG |
| | | | | | | AGCCACAGCTCTGCAGTGTATTCTCTTGG |
| | | | | | | ATGATGACAGAGGCCAATTATTTAATGATA |
| | | | | | | CAGGGACCGATGTGGTCATTCGATAAAGT |
| | | | | | | TCAGTGCTTTAGATATGATTGAGACAGAA |
| | | | | | | TGAGTGACTCTTAAGATTATTCATACTCAA |
| | | | | | | GAGGAGATCCTTTTGTTTGTGTGG (SEQ ID |
| | | | | | | NO: 976) |
| 24 | CCCTG | 61.508 | 340 | 128 | 212 | CAAGAGAGCTACTACCTCGGAGCAGCCT |
| | ACTCG | | | | | TGTCTCAGACCTGCAGCCACCGTGTCTC |
| | AGCGA | | | | | GACCCTCCCTCCCTGATCCACTCTGCCC |
| | TTCTC | | | | | GTCAGCAGGATTCCGGTCTACACCCCGC |
| | C (SEQ | | | | | AGAGACTCCGCAGCGTACGAGGAGAACC |
| | ID NO: | | | | | CCGCCTTCTACCAGAAAAAGAAGCGACTT |
| | 894) | | | | | CCTAGATCTCCCGGAAGTCCCTTTCGCTC |
| | | | | | | CCAGCGCTTCGCGTACCAGGAAGGGGAC |
| | | | | | | GGCGTCCTGAAAGGGACATTTGAAAAAC |
| | | | | | | GGAGGCAACGCGTCTATTAATTAGGTGG |
| | | | | | | CGG |
| | | | | | | CGCCTGGGGTCGCAGCACTCCAGAGGCT |
| | | | | | | GAGGTGGGAGAATCGCTCGAGTCAGGG |
| | | | | | | (SEQ ID NO: 977) |
| 25 | CGCAC | 61.508 | 487 | 201 | 286 | CTCACCTGCCCTGGGACTGAAGCGGGG |
| | GAATT | | | | | GCCACCCCGAGCCCGGGGGGGGGGGG |
| | AGGCC | | | | | GCGGCGGCGCAGGGGGAGGAGGGCAG |
| | CGAGC | | | | | CGCGGGGCTCCTGGCACAGCGGCCGCC |
| | T (SEQ | | | | | GGGCGCCTGGTGCTGCCGAGCCGCGGA |
| | ID NO: | | | | | CCCGCCCAGAGATATAAATAACATTATCT |
| | 895) | | | | | GAGGAGGGACATTCCTGCCGGGGGACAT |
| | | | | | | CGCTGCTGCCGGGACCAGATAGTCCCGC |
| | | | | | | GGGGGGGGGGGGGAGGGGGGGCCGCA |
| | | | | | | GCCTCCCGCAGCGCCAAGCCCAGCCCC |
| | | | | | | CGCCTTCCCCACCCACTCACGCACCTGC |
| | | | | | | CAATCAGCCTCCGCGCCTGGGGGCACCT |
| | | | | | | GCCGGGCCTCAGCCCGGCTCCTGGAAC |
| | | | | | | CCGCCTCTGCCTCCCCGCCCGCCGCTGA |
| | | | | | | GCCTGGGGCGCCTCCATCGTCGTTCATT |
| | | | | | | GCCCCTAACCCCGCGCCACCCCGAGCC |
| | | | | | | CCCTGAGGGGGGAAGGGGGTTGGACTC |
| | | | | | | TAGCTCGGGCCTAATTCGTGCG (SEQ ID |
| | | | | | | NO: 978) |
| 26 | GCTTG | 62.768 | 325 | 200 | 125 | ACAACTCCTGGGGGGTCCAGATGCTCAC |
| | AACCC | | | | | AGCTGGAGAAAGTGAACATTGACTGGGG |
| | AGATA | | | | | TGGCAGTGTGGGGCCGGGTGAAGGCAG |
| | GCCTG | | | | | CAACTGCGGAGGAGGCAAAGAAGCCCAG |
| | GCTC | | | | | GGAAGGGTGGGCAGGAGCTGCTGGAGT |
| | (SEQ ID | | | | | CAGAGAATGCCCTAGAGGCAAATCTGGG |
| | NO: 896) | | | | | GCCTGCCTCTTCCCGCCAGAGTACCAGA |
| | | | | | | GCCTGACTCAGATAGCCCAGCCCCAGAA |
| | | | | | | CCCCACAGAGGGACATGAAGGGAAGGCA |
| | | | | | | CAGCCATCCCTCTCTCCAGGGGGCCCCA |
| | | | | | | TGCTAGAGAGAGGCAGTGGTTAAGAGCC |
| | | | | | | AGGCTATCTGGGTTCAAGC (SEQ ID NO: |
| | | | | | | 979) |
| 27 | GGAAG | 61.508 | 360 | 135 | 225 | GCTGGCTGCTCATGGTCCATGTCTTCTCA |
| | GTGCT | | | | | GCTCCAGTATCCAACAGTACTAGCCCGTT |
| | GCCGC | | | | | TCTGCTGAGGTTGCTTACCTTTGGCAGGG |
| | TTCTCT | | | | | AGCCTCTTGGGCAGGAGTCCTGTTTCCCT |
| | (SEQ ID | | | | | CCTGAGGACCCACACCTGTCTGTTGCCT |
| | NO: 897) | | | | | GCCCTGCTGCCTACCATTGAAACAGGGC |
| | | | | | | TTGCTCCAACACAGCCACCTCTTTTATCTC |
| | | | | | | TGCCACCAGGCACCTCCAGCCTTGGGTC |
| | | | | | | CTTATTCCTTTCAGGTATGGGTCAAGTACT |
| | | | | | | AGTTCTTTTTTCTCCTCAGACTTCAGGGAA |
| | | | | | | CACATGTCAAGCACTCCAAGGGAACCTGT |
| | | | | | | GGGAAGCCCTTTCACAATGAAGAGAAGC |
| | | | | | | GGCAGCACCTTCC (SEQ ID NO: 980) |
| 28 | GAGTG | 61.508 | 408 | 158 | 250 | CCCTGCCTGCAATGGTGAGCTACATCTG |
| | AGGTG | | | | | CATCTTCCTATTTCCTTTCCCTGTCTTTGA |
| | CAACT | | | | | AATCCAGTAGAGAAGCCCAGACCGCACA |
| | GCTGC | | | | | ATGGGAACATCCCACCTCTCAGATGGCAA |
| | G (SEQ | | | | | TGCTGCCCAAGCCGCTCCACCCCCAGGG |
| | ID NO: | | | | | GCCTTGCTTGCATGTGCCCGAGGCCAGC |
| | 898) | | | | | CCTGCAGGGCAGACAGTAGCACAAGAGC |
| | | | | | | ACCATCTTGGTCACAAAGTTGTCTAAGCT |
| | | | | | | CAAAGACAGCCCCGGAAAAACACCTGAC |
| | | | | | | ACACTCCACAAATAATAATCAGCAGATCTT |
| | | | | | | CATGCCATCCCATGTGACAGATGGGGAG |
| | | | | | | CAGAGGCCTAGGGGGCTGCTGGCCCCTT |
| | | | | | | TGCTGAGAGACCCCTGACAAAGTTAGTCC |
| | | | | | | AATGCCTCTGCAAAATCGCAGCAGTTGCA |
| | | | | | | CCTCACTC (SEQ ID NO: 981) |
| 29 | GCTGG | 61.088 | 332 | 206 | 126 | CTGTGGGTGCAGCTTCAGCAGACTTAAAT |
| | AGTTT | | | | | GTTCTTGCCTGCCAGCTCTGAAGAGAGC |
| | GCTGA | | | | | AGCAGATCTCCCAGCACAGTGCTTGAGC |
| | AGGTC | | | | | ACTGCTAAGGGACAGACTGCCTCCTCAA |
| | CAC | | | | | GTGGGTCCCTGACCCCCCGTGCCTCCTG |
| | (SEQ ID | | | | | ACTGGGAGACAACTTCCAGCAGGGGGCG |
| | NO: 899) | | | | | ATAGACACCTTATACAGCAGAG |
| | | | | | | CTGTGGCTGGCATCTGGCAGGTGCCCCT |
| | | | | | | CTGGGATGAAGCTGCCGGAGCAAGGAG |
| | | | | | | CAGGCAGGAATTTTTGCTGTTCTGCAGCC |
| | | | | | | TCCGCTGGTGATAACCAGGCAAACAGGG |
| | | | | | | TCTGGAGTGGACCTTCAGCAAACTCCAG |
| | | | | | | C (SEQ ID NO: 982) |
| 30 | GTCTG | 61.508 | 368 | 235 | 133 | GCGCCTGGCTCAAGACGAAGATTTAACC |
| | GGGAA | | | | | GAGAACAAAAGAACGTTTGCCAATCAGAA |
| | CTGGG | | | | | AACGCTACCCGAGAACGAGGATAACCCC |
| | GTGAC | | | | | GCTTTGTGTTTTGAAAACTCTTTAATTAGC |
| | T (SEQ | | | | | CTGGTTTCTAAGACGCATTAAAACATTCCT |
| | ID NO: | | | | | ACGCAGATTCTAAATGGAGGATCAAATGG |
| | 900) | | | | | TTGCTTCTGCAACGAAGATGGGATCCCGA |
| | | | | | | AAGGGCACACGCCGCAGAACCAAGGCAC |
| | | | | | | ACGGGGCCACTGAGACGCCCGGCGCGT |
| | | | | | | CGTACAGAGTGTTCCTGGGCGCTCGGTC |
| | | | | | | TCAGGTTACTTCTAGAACCAGTCTCCCCA |
| | | | | | | ACGCCGTCTTCGTTTCCTTAAAACCTCGC |
| | | | | | | TAGAGTCACCCCAGTTCCCCAGAC (SEQ |
| | | | | | | ID NO: 983) |
| 31 | AGATG | 61.088 | 331 | 128 | 203 | TCTGTGGGCCCCTCAAGAGGACCTGACA |
| | TGGCT | | | | | TCTTCTCATTCATCTCTGCCTTGTTTAACA |
| | AAGAC | | | | | GCTGGGCAAATTGAGGCCCAGAGAGGG |
| | CACGT | | | | | GCAATGACTTGCCCAGGGTCACGCAGCG |
| | GGG | | | | | AGTCTGGACAGGTAGTCCAGGGCCCCCG |
| | (SEQ ID | | | | | GGGTGTAGGCTCAGCAGCCAGCCCTAGT |
| | NO: | | | | | CAGGGACAGAACACAACCTGGTGACCTC |
| | 901) | | | | | TGCTTTGCCTCAGGTTCTAGACACAGGGT |
| | | | | | | GTTAGGACGGTTCTCGGTCTGAGGTCAG |
| | | | | | | TTCTGGGGCCGGCACCGGGGTGAGCCA |
| | | | | | | CGATCTCCCACTAGGGGGGGCCAAAAGC |
| | | | | | | CCACGTGGTCTTAGCCACATCT (SEQ ID |
| | | | | | | NO: 984) |
| 32 | GGGAT | 61.508 | 362 | 128 | 234 | CGGTCTTGGTTTCAGACCCGCCACTGAG |
| | CCAGG | | | | | CCCACACACCAACAGAGAGAAATATGCTG |
| | GCCAC | | | | | AAATGCTGTTTGAAGCCTTCAACACCCCT |
| | AAAGC | | | | | GCAATGCACATCGCCTACCAGTCGCGCC |
| | A (SEQ | | | | | TGTCCATGTACTCCTATGGAAGGACCTCC |
| | ID NO: | | | | | GGCCTGGTGGTGGAGGTGGGCCATGGC |
| | 902) | | | | | GTGTCCTACGTGGTCCCCATCTACGAGG |
| | | | | | | GTTATCCTTTGCCCAGCATCACCGGAAGG |
| | | | | | | CTGGACTACGCGGGCTCTGACCTGACAG |
| | | | | | | CCTACCTGCTGGGCCTGCTGAACAGTGC |
| | | | | | | GGGGAACGAATTCACCCAGGACCAGATG |
| | | | | | | GGCATCGTGGAGGACATCAAGAAGAAAT |
| | | | | | | GCTGCTTTGTGGCCCTGGATCCC (SEQ ID |
| | | | | | | NO: 985) |
| 33 | GAGCC | 61.508 | 340 | 126 | 214 | CCGAGATCACGCCAGTGCACTTCAGCCT |
| | ACCAT | | | | | GGGCGACTGAGTGAGGCTCCATCTCAAA |
| | GCCAG | | | | | AAAGAAAAAACTTTGGTACAGATAATCTG |
| | GTCAT | | | | | GCTCCTCCCTGGGCATCACCCCCGGGAG |
| | C (SEQ | | | | | CCTACTCCACTCCATTAGCCTACAGCCCT |
| | ID NO: | | | | | GCCTCTGACTTCAAACCCTAAGCATGATG |
| | 903) | | | | | GCCATGAATACTAAAAAAATACTCAACATC |
| | | | | | | AGTATCAACTGAGTACCCTTTCTAGGTAT |
| | | | | | | CTATATTAGACACTTTTTCTGCTGAAACCC |
| | | | | | | TTTTATGAGTAAAAAAAGGAACTGAATGTT |
| | | | | | | TATACAAAAGTTTATGTAAATCTTTAGATG |
| | | | | | | ATGACCTGGCATGGTGGCTC (SEQ ID NO: |
| | | | | | | 986) |
| 34 | GGCCT | 61.508 | 490 | 202 | 288 | GGGGAAGGGGAAAGAGGCAGTTAATATT |
| | CCTGG | | | | | TAACAAGCACAGAGTTTTTGTTGGGGATG |
| | GCTCA | | | | | ATTATGCAACATTATGACTGTATTTAATGC |
| | CATGA | | | | | CAGTGAATTGCACACTTACAAATCATTAAA |
| | T (SEQ | | | | | ATGATAAATATTAGGTTATAGTATATTTTAC |
| | ID NO: | | | | | CAACATTAAAAAAACCAACATGTATTAAAT |
| | 904) | | | | | CCACAGCTGGGCAGTCCTCTTGACCTTG |
| | | | | | | CAGACTGGCAGGAGTGAACCATCATTTAT |
| | | | | | | TACTTTGGGCTTCTCAGTAAAAAAAAAAAA |
| | | | | | | AATATATATATATATACACACACACACACA |
| | | | | | | CACACATATATATATATATACACATATATAT |
| | | | | | | ATATATATACCATAAGCAAAGTATTAGGGA |
| | | | | | | ACCAAAGGAACTAGACAATTTTATAAGGG |
| | | | | | | GGCCCAC |
| | | | | | | TTAAAATCCAGGCTGTTGAGCCAGGTGCA |
| | | | | | | GTGGCTTAAACCTATAATCCAAGCACCTT |
| | | | | | | TGGAGGCCAAGGCAAGAGGATCATGTGA |
| | | | | | | GCCCAGGAGGCC (SEQ ID NO: 987) |
| 35 | GGGTT | 61.508 | 418 | 250 | 168 | GCTGGACTGTCGCACCTCTGATCTCAGAT |
| | GAGGG | | | | | CAGGATGGAAAGGAAGGAACTGAGAGCT |
| | GACAC | | | | | AAAAAGAGAAATGGAGATCACTACGGTAG |
| | AGCAC | | | | | AACCAACTAACCTGGAGTTCAGCCGGTCA |
| | T (SEQ | | | | | TTTGGGAGACTATCCTGAGGGATTATCTT |
| | ID NO: | | | | | TTGGGGTCATGAGCAATTAGGATCTCTGA |
| | 905) | | | | | GATCTGCTGACTCCTGTGGCATCATCTGG |
| | | | | | | ACAGTATGCCTTCTCATCAGGGTACCCAG |
| | | | | | | GAGGCCTGTCCCCTCCTTCCCCGGGAGG |
| | | | | | | GACTCTGGCATGTCCTTCAAAACGCAGCT |
| | | | | | | CACACATAATCCCTGCTGAGCTTTCCAGA |
| | | | | | | ATGTCTCCAGAAAGAACTGTTTCCTCTGC |
| | | | | | | ACTTTTCGGTTGTTCTGGTAGCTCACTCTT |
| | | | | | | CGCCATAATTACTTATCTGCTAGTGCTGT |
| | | | | | | GTCCCCTCAACCC (SEQ ID NO: 988) |
| 36 | GTTCA | 61.508 | 331 | 127 | 204 | GTCCCCTCCACCCCTTAGACTCCAGCCA |
| | GGTGG | | | | | GATTCAGGCATTCCCTGCATCCCACGCCA |
| | TGCCA | | | | | ATGCATCACTGTCCCCATCCTAAGTATCG |
| | GGTGC | | | | | TGGATAAGCTGCAGTGACAAGCCCCAGG |
| | T (SEQ | | | | | GCCTCCTGTCGAAAACGGTGTCAGCCTG |
| | ID NO: | | | | | GCCGGGCACAGGCTGGTCTCCAAGACTC |
| | 906) | | | | | TGTGCCCTGGACTCAGCTCATAGCAGCT |
| | | | | | | CCTTCCTGTTGTTCAGGTCTCGATTTCAA |
| | | | | | | GGACACCATCGCAAAGACTGTCCCCAAG |
| | | | | | | CACTTCACAAAAGCTACCCACCTCCACCT |
| | | | | | | CTCACGCTGTCTGCGTCTCCCCTCAGAG |
| | | | | | | CACCTGGCACCACCTGAAC (SEQ ID NO: |
| | | | | | | 989) |
| 37 | CTGTG | 61.088 | 495 | 313 | 182 | CCTTCCTCTGTGGTGTGACTTTCAGTTGC |
| | GTTTC | | | | | TTCTAGATTTTACTCTTCTAACTCAACAGT |
| | AGGCA | | | | | TAATGCTTTTGTGGGATAAAATTTCCCTTC |
| | TCTGC | | | | | ATATTTAGGATTATTCCTTTAGGTTAACTC |
| | TGG | | | | | TCAGGCCTACTAGTCCTCTGATTCACACT |
| | (SEQ ID | | | | | GTCTTTTTAATTTTTCCCAATCTATTACATA |
| | NO: 907) | | | | | TTTTCTAAATTTTGTACACCATTCATATGTC |
| | | | | | | ATGTGTATCATATCAAAGAGCCTAGAGAA |
| | | | | | | AATTTTCCTCTGTGTGTTCCTCACTGGGT |
| | | | | | | GGTTACAATGGAGAAATTACAGGGCAGG |
| | | | | | | ACTAGCATTAGGGTGAGGAGAGCAAGGC |
| | | | | | | ACTCAGGCGCAAAACTTAAGGGGGCACC |
| | | | | | | AATATCCTCAGTGATCAAGAGAAGTAATAT |
| | | | | | | TGTCACGTAACTGTATTAGCTTTTTAGGG |
| | | | | | | CTACTACTGTAATGAAGTACAGTATTCTCT |
| | | | | | | CTTATCCATGGGGAAATGCATTCCAAAAC |
| | | | | | | CCCCAGCAGATGCCTGAAACCACAG |
| | | | | | | (SEQ ID NO: 990) |
| 38 | GCTGG | 61.088 | 347 | 130 | 217 | GGAGCAAGTGGTCCCTGTGGAAAGCCGC |
| | CAGCA | | | | | TGCACTAGGTGAGCCCGGCCCTGGTGAG |
| | GTTCT | | | | | GGTGCCTTGTGAGTGGAGCCTGCTTGTG |
| | GATGA | | | | | CTGCTGTGCCCCGCTGCTTCCAGGCGGC |
| | TCC | | | | | GCGGCCCTCCGTCTGATTGCTGGAGGAC |
| | (SEQ ID | | | | | TCTTCGGTGTGGACACACCGTGGTTTGTT |
| | NO: 908) | | | | | TACCCATCCTGGTCAATGGACAATTGGAA |
| | | | | | | CTGTGGTGAACAAGCATTCCTGCACCTGT |
| | | | | | | ATGTGGATATTGTATGTCCATTTTTCTTGG |
| | | | | | | GAGTGGAATGGCTGAGTCATCTGGTAGG |
| | | | | | | TGTCTTTACCTTTTAAAGAACTAAGCGCTT |
| | | | | | | TTTCCAGAAGGATCATCAGAACTGCTGCC |
| | | | | | | AGC (SEQ ID NO: 991) |
| 39 | GCCCG | 59.378 | 518 | 219 | 299 | GGGAATGCTGGCACTGTCTAGGATAGAA |
| | TTTCA | | | | | TGTTCCTAATTATAGTAGCTTACCCATTGA |
| | GTGCT | | | | | AGGCTGAAATAAAACATGCAAGGATGTGT |
| | ACTGT | | | | | GTGTTTGTGTGTGTGTGTGTATGTGTGTA |
| | G (SEQ | | | | | AAGGCTTTAGAAAGCTGATGAGACCTGAG |
| | ID NO: | | | | | GTACTCAATCTCCAAGAGAAGAAAACTGA |
| | 909) | | | | | GCACCCTGAGGACAGTTAG |
| | | | | | | GGAACAGGGCTGTTGAATCATAGCAGAC |
| | | | | | | AGCAACAGGGCCTCTAGTGTGCAAACAG |
| | | | | | | AATTGGAGTTCAGATCCTCCAAAGTGGCT |
| | | | | | | GTGATCTGAAAGACAAAACTGACATCAAA |
| | | | | | | GAATCCTCACAGAAGCGAGCGGAAATATT |
| | | | | | | TTTATATACTTTTACAAATCCTTTGCAAAAT |
| | | | | | | TCAAAACTTTGCATACAGAAGTCAAGACA |
| | | | | | | AAGTAAGATGCTCAGAAGGCTGTAATCCC |
| | | | | | | TGGAAGGCTAGAGAATTAAGCAGTATCAG |
| | | | | | | AGATGTAAGATGCTAGCAAGAACAAAGTT |
| | | | | | | GATTTTAATCTGAACACAGTAGCACTGAA |
| | | | | | | ACGGGC (SEQ ID NO: 992) |
| 40 | ATGCG | 61.508 | 343 | 217 | 126 | GGGCTTCTGGCATCACTGGGAGTCCTGG |
| | ATGGG | | | | | CCAGGCCCCAGGCACACCACAGTGGGG |
| | AGGCC | | | | | GACAGGAGCCCCAGCCCAGCTGGGAGA |
| | CAGAG | | | | | GGCAGGCCTCCTTGATCCCTATCAGCCC |
| | T (SEQ | | | | | GGATGTTGGGGAGGGGGTATGGTGCTG |
| | ID NO: | | | | | GTCGGGTCCTTGGGATCCCTAGGTGGCT |
| | 910) | | | | | CGGGGCTCCAGAGTACAGGCTCTGATAC |
| | | | | | | GTGACAGGCCTGTAGGTGGCCGGGGCC |
| | | | | | | AGCAGGACCTCAGGTGGGGGCAGCAGC |
| | | | | | | TGATGATGGAGCCAAGCAGGGGTCTTGG |
| | | | | | | AGGTGGAAGCTGAAGCTTTGTTGGGGTC |
| | | | | | | TGAGGGAGGAAATGAGTGGACTCTGGGC |
| | | | | | | CTCCCATCGCAT (SEQ ID NO: 993) |
| 41 | CATCT | 61.508 | 343 | 128 | 215 | CGCTCTTCCCAAGCTCCCGTTGGCCCTC |
| | TCGAC | | | | | ACCGTCGAAGTCAATGCGGCCGTCGTTG |
| | AGGTG | | | | | TTCTTGTCGCCGTCTTTCATCAGAGATTC |
| | CGCTG | | | | | GATCTCCTCGTCCGTCACGTGCTCCCCG |
| | G (SEQ | | | | | GAGGCCCTGAAAATCTCAGCCAGCTCCT |
| | ID NO: | | | | | CCGGGTCGATGTAGCCGTCTGCATTCCTT |
| | 911) | | | | | CAGGTCCGAGGGACAGGGCAGGGCTCA |
| | | | | | | GGGCCGGGGCGAGCTGCCCTGGCCACC |
| | | | | | | ACACTCGACGCCCCGCTTCCGCACTCCC |
| | | | | | | AACACGGGGAAGCTTCCAGCGCTGCCGG |
| | | | | | | CCGGGTTCTGACTGCTAAGCCCCTCCCT |
| | | | | | | CGGCTCCCGGGCCCCCAGCGCACCTGT |
| | | | | | | CGAAGATG (SEQ ID NO: 994) |
| 42 | ATTTG | 62.768 | 365 | 126 | 239 | GGTGTTCTCACACCCCAGGTGTCC |
| | CTGTG | | | | | TCACAAGGGGCTTGGGCGCAGAA |
| | CGAGG | | | | | CAGGGCTTGGGGGCGGGTAGCG |
| | CCTTC | | | | | GGGCAAAGCGTCTTCGGGGGGGG |
| | GCCA | | | | | AGATCAGTGACCCGGCAGGGAGG |
| | (SEQ ID | | | | | CCGCACCTGGTCCACGAGGCCCT |
| | NO: 912) | | | | | CGGGGTTGAGCAGCGTGGCCCTC |
| | | | | | | GCGATGGTGTTCACCTGCAGCGT |
| | | | | | | GTATCGAGTGTGGGGGAGTAGGA |
| | | | | | | GCTGCGAGCGGAGCGGATCACGT |
| | | | | | | GAGCTGAAGGCCGGGGACAAGGC |
| | | | | | | CGCCCGGCCCCTGCCCCGCTGGG |
| | | | | | | CCCCCACCCGGGGTCGCGGACCT |
| | | | | | | TGTAGATGGGGTGGCAGAGCGGC |
| | | | | | | AGCTGGCGCAGCGTGGCCATGGC |
| | | | | | | GAAGGCCTCGCACAGCAAAT (SEQ |
| | | | | | | ID NO: 995) |
| 43 | No | No | No | No | No | |
| | Primers | Primers | Primers | Primers | Primers | |
| 44 | CCCTG | 61.508 | 398 | 236 | 162 | TGGCCTCCCAGATTGCTGGGATTA |
| | GCTCA | | | | | TAGGCGTGAGCCAGGAGTGGTCA |
| | GAGCC | | | | | TTTTTGAAAAGGTCCTAAGCTTACT |
| | CTCAA | | | | | GATTTTTTTTTCCTAAAATCATCTG |
| | T (SEQ | | | | | GTTTGTTAAAAATTATTTCTTTAGA |
| | ID NO: | | | | | AGCTTAAAAAAATAACACAAAATAA |
| | 913) | | | | | AGCACTGTCCTTGTTCTGCAGGTG |
| | | | | | | ATCGGTGTCTTTGGTGAGTCTGTT |
| | | | | | | AAAGGCTATGGGGAGGTGACAAG |
| | | | | | | GCGGGGTCGCCGGCAGCATGTCA |
| | | | | | | GGTACTGTGGCTTGAATTCAGAGG |
| | | | | | | AGGCTCTGGGGAGATTTTTAAATG |
| | | | | | | AAAGGAACTTAGACTGATCTTTCG |
| | | | | | | TTTTCTCGACAG |
| | | | | | | GTTCACTGAATATGTAAAAGATGGGCTGA |
| | | | | | | AACACACGTGTGTGAAATTCTACATTGAG |
| | | | | | | GGCTCTGAGCCAGGG (SEQ ID NO: 996) |
| 45 | GCTGG | 61.508 | 395 | 126 | 269 | GCTTGGAGCTGGGCCATCAGATCAGATG |
| | CACAT | | | | | AAGAGGTAAGAAGAGCCTTGCAGTGGAC |
| | GGGGA | | | | | GCAGGGTGATCACCAAGGGAGGGGGGG |
| | GACAT | | | | | GAAGGCTAGCCAAGTCCAGGCTGCAGAG |
| | C (SEQ | | | | | CCATGGGGCACTGGCAGCAGTGAGACAG |
| | ID NO: | | | | | CCGCTCTGTGTGACCAGGCTGGGGAGG |
| | 914) | | | | | CAGTGCTCTGGGTCACCTGCCTGCGCTG |
| | | | | | | GGCTGGACGGCGAGATGACACCTTCATC |
| | | | | | | CCTCTTTCAGCCACACTGTCCAGAGTGAG |
| | | | | | | TTCACACCCTCATTATATCTCACCTGGAAC |
| | | | | | | ATTCCAGCAGCCCTTCACTTGTCCTCCCC |
| | | | | | | CACACACCAACATGATCTGTCTGAATCAC |
| | | | | | | AAATCTGATCCCACTTCTCCTTGATGATAA |
| | | | | | | CATTCGATGTCTCCCCATGTGCCAGC |
| | | | | | | (SEQ ID NO: 997) |
| 46 | CCTCT | 61.508 | 426 | 172 | 254 | CTGTACACACGCCCAGATGGCTGTTTAGA |
| | TTCGG | | | | | AAAGAACCTCACCCTGATTTCCAACAAGG |
| | ATGGG | | | | | TTTCCCCTGGAGAGTCTACGAGTTTTAGA |
| | CCCAT | | | | | GGCAGAGGCAGTTGTTGGAACTGTGTTC |
| | G (SEQ | | | | | ACCAGGATGAAGGAAGAAAGGAAGGGAT |
| | ID NO: | | | | | GTTCTCAGCAAAGAGCCTGGGCCTGGCC |
| | 915) | | | | | TGGTCCTTGCCAGTCCTGCCTCATGACAG |
| | | | | | | CCGCCACTGCCCGAGAGAGCCTCCCAGC |
| | | | | | | CCAGCCGCCTGCAGGGCATCCTCCGCCC |
| | | | | | | TGGGTTGGGGGCTGTGAGCTCACATGCT |
| | | | | | | TTGGGGACTACAGGGTCATGAAACTGAG |
| | | | | | | CAAAGGGGCTGGTGTAAGAGGATTGAGC |
| | | | | | | AATGGACACACTGCCTCGGCGGTCAGGG |
| | | | | | | ACAAAAGGGAGTGTGAGGACCGTGATGA |
| | | | | | | ACTGGAGCACATGGGCCCATCCGAAAGA |
| | | | | | | GG (SEQ ID NO: 998) |
| 47 | CAGGT | 61.508 | 360 | 137 | 223 | GCTTCTCCTGAAGACCACGTTTCCTGCCC |
| | CCGTC | | | | | GGTCGGCCTTCCACCCTTTCACCAGGGC |
| | GCATC | | | | | GAAGTCTGCCCGGATGGCGCGCTCCAAA |
| | GTCTG | | | | | AGGAAGTGGTCGCCGTTGAACTCCCTCA |
| | T (SEQ | | | | | CCTCTCGGGGCTGGCTCATGAGCGCCAG |
| | ID NO: | | | | | GTGGCCGTCCGGGGTGTAGCGGATGGG |
| | 916) | | | | | GGCGCCCCCTTCCTGGACCAGGGTCCC |
| | | | | | | GTAGCCCGTGGGGGTGTAGAAGGGGGG |
| | | | | | | CACCCCGGCGCCCCCCGCGCGGATGCG |
| | | | | | | CTCGGCCAGGGTGCCCTGGGGCGTGAG |
| | | | | | | CTCCAGCTCCAGCTCTCCTGCCAGGTACT |
| | | | | | | GGCTCTCGCACAGGGTGTTCTCGCCCAC |
| | | | | | | GTAGGAACAGACGATGCGACGGACCTG |
| | | | | | | (SEQ ID NO: 999) |
| 48 | GCTTC | 60.908 | 342 | 209 | 133 | TGTTCCTACGTGGGCGAGAACACCCTGT |
| | TCCTG | | | | | GCGAGAGCCAGTACCTGGCAGGAGAGCT |
| | AAGAC | | | | | GGAGCTGGAGCTCACGCCCCAGGGCAC |
| | CACGT | | | | | CCTGGCCGAGCGCATCCGCGGGGGGGG |
| | TTCC | | | | | CGCCGGGGTGCCCGCCTTCTACACCCCC |
| | (SEQ ID | | | | | ACGGGCTACGGGACCCTGGTCCAGGAA |
| | NO: | | | | | GGGGGCGCCCCCATCCGCTACACCCCG |
| | 817) | | | | | GACGGCCACCTGGCGCTCATGAGCCAGC |
| | | | | | | CCCGAGAGGTGAGGGAGTTCAACGGGG |
| | | | | | | ACCACTTCCTTTTGGAGCGCGCCATCCG |
| | | | | | | GGCAGACTTCGCCCTGGTGAAAGGGTGG |
| | | | | | | AAGGCCGACCGGGCAGGAAACGTGGTCT |
| | | | | | | TCAGGAGAAGC (SEQ ID NO: 1000) |
| 49 | GGTAA | 61.288 | 431 | 284 | 147 | CTGTTTTCCACAGTGGCCGAACCATTTTC |
| | GACTC | | | | | TATTTCCACCAGCAATGTAGCGAATTCCA |
| | ACCCA | | | | | ATTTCTCCATTTCCTCACCAATACTTGGTA |
| | GCCTG | | | | | TTGTCCTCTAAAAAAAGATCCTAGCTGTTC |
| | GA | | | | | TAGCGGGTGTGAGGTGGTATCTCATGGT |
| | (SEQ ID | | | | | GGTTTTGATTTGCATTTCCCTAATGGCTAA |
| | NO: 917) | | | | | TGATGCTGAGCATCTCTTCCTGTGCTTGT |
| | | | | | | TGGCTGTCTGTATATCGACTTTGGAGAGC |
| | | | | | | GTATTGATTTTGCATTCCTGGTGCCTCCT |
| | | | | | | GCAGGGCCTGGTGCGGACCCAGTGCTC |
| | | | | | | CA |
| | | | | | | GACGGCTCTGCTGAGTAAAGAACAGGAG |
| | | | | | | AATAAACAAGTTGTGTTCCCCTGCCGTGG |
| | | | | | | TCCACGCTGGGCTCCTTGTGGACATACCT |
| | | | | | | GTCTCGTGAGGCAGTGAGACCCCTTTGA |
| | | | | | | CATTCCAGGCTGGGTGAGTCTTACC (SEQ |
| | | | | | | ID NO: 1001) |
| 50 | CCCAC | 60.908 | 554 | 233 | 321 | CTGCACACTTGCACACACACAGGCAGGT |
| | AAGCT | | | | | ATAGGCACACAGTTCCACCAAAGCGAAGT |
| | CTTGA | | | | | CCAAATCAGAGTTCTTACCGATTCTACCA |
| | CTTCT | | | | | CTCTGTAATACTCTCAGAAGTTCCCACAA |
| | GTCC | | | | | CTGCCCAACACCTCACCTACCCGTTTCCT |
| | (SEQ ID | | | | | GCTGCACAAAGTCTCCTTCACTCTCATCT |
| | NO: | | | | | TTTCGATACATCGTCAGGCAGGGCAGAA |
| | 918) | | | | | GGGCACTACGCCGCAGAGCATTCGAGGC |
| | | | | | | TCTCAGCACACTGCCAGCCAGCGTGAAA |
| | | | | | | ATGCGGCTTCACTACAGCCCAGAGAAAA |
| | | | | | | GGGCCAGGTTTAGTCATCGATCCAGATG |
| | | | | | | CATTTTCCCGGGAAATGACCATTCCCAAA |
| | | | | | | CCCACAGAACAGTTTGGCTTCTCTGGATA |
| | | | | | | TCCTTATAGGAAATAGGGGTGAGAGGTG |
| | | | | | | GGAAAAGCTTCTCAATCTCATACAGAAAC |
| | | | | | | AGCACAAATATTTAATACACCTTTTGCAAC |
| | | | | | | AAGATCTTCTCTGTTCTCCATTAAGCATCA |
| | | | | | | TGTAAATCTCACTAGTGTGGTTAACAAAAT |
| | | | | | | GGCTTTCCCCAAGGACAGAAGTCAAGAG |
| | | | | | | CTTGTGGG (SEQ ID NO: 1002) |

### REFERENCES

[0779] The following references are each incorporated herein by reference in their entireties.
[0780] 1. Jinek, M. et al. A Programmable Dual-RNA-Guided DNA Endonuclease in Adaptive Bacterial Immunity. Science 337, 816-821 (2012).
[0781] 2. Cong, L. et al. Multiplex Genome Engineering Using CRISPR/Cas Systems. Science 339, 819-823 (2013).
[0782] 3. Komor, A. C., Badran, A. H. & Liu, D. R. CRISPR-Based Technologies for the Manipulation of Eukaryotic Genomes. Cell 168, 20-36 (2017).
[0783] 4. Komor, A. C., Kim, Y. B., Packer, M. S., Zuris, J. A. & Liu, D. R. Programmable editing of a target base in genomic DNA without double-stranded DNA cleavage. Nature 533, 420-424 (2016).
[0784] 5. Nishida, K. et al. Targeted nucleotide editing using hybrid prokaryotic and vertebrate adaptive immune systems. Science 353, aaf8729 (2016).
[0785] 6. Gaudelli, N. M. et al. Programmable base editing of A⋅T to G⋅C in genomic DNA without DNA cleavage. Nature 551, 464-471 (2017).
[0786] 7. ClinVar, July 2019.
[0787] 8. Dunbar, C. E. et al. Gene therapy comes of age. Science 359, eaan4672 (2018).
[0788] 9. Cox, D. B. T., Platt, R. J. & Zhang, F. Therapeutic genome editing: prospects and challenges. Nat. Med. 21, 121-131 (2015).
[0789] 10. Adli, M. The CRISPR tool kit for genome editing and beyond. Nat. Commun. 9, 1911 (2018).
[0790] 11. Kleinstiver, B. P. et al. Engineered CRISPR-Cas9 nucleases with altered PAM specificities. Nature 523, 481-485 (2015).
[0791] 12. Kleinstiver, B. P. et al. High-fidelity CRISPR-Cas9 nucleases with no detectable genome-wide off-target effects. Nature 529, 490-495 (2016).
[0792] 13. Hu, J. H. et al. Evolved Cas9 variants with broad PAM compatibility and high DNA specificity. Nature 556, 57-63 (2018).
[0793] 14. Nishimasu, H. et al. Engineered CRISPR-Cas9 nuclease with expanded targeting space.

### Science 361, 1259-1262 (2018).

[0794] 15. Jasin, M. & Rothstein, R. Repair of strand breaks by homologous recombination. Cold Spring Harb. Perspect. Biol. 5, a012740 (2013).
[0795] 16. Paquet, D. et al. Efficient introduction of specific homozygous and heterozygous mutations using CRISPR/Cas9. Nature 533, 125-129 (2016).
[0796] 17. Kosicki, M., Tomberg, K. & Bradley, A. Repair of double-strand breaks induced by CRISPR-Cas9 leads to large deletions and complex rearrangements. Nat. Biotechnol. 36, 765-771 (2018).
[0797] 18. Haapaniemi, E., Botla, S., Persson, J., Schmierer, B. & Taipale, J. CRISPR-Cas9 genome editing induces a p53-mediated DNA damage response. Nat. Med. 24, 927-930 (2018).
[0798] 19. Ihry, R. J. et al. p53 inhibits CRISPR-Cas9 engineering in human pluripotent stem cells. Nat. Med. 24, 939-946 (2018).
[0799] 20. Richardson, C. D., Ray, G. J., DeWitt, M. A., Curie, G. L. & Corn, J. E. Enhancing homology-directed genome editing by catalytically active and inactive CRISPR-Cas9 using asymmetric donor DNA. Nat. Biotechnol. 34, 339-344 (2016).
[0800] 21. Srivastava, M. et al. An Inhibitor of Nonhomologous End-Joining Abrogates Double-Strand Break Repair and Impedes Cancer Progression. Cell 151, 1474-1487 (2012).
[0801] 22. Chu, V. T. et al. Increasing the efficiency of homology-directed repair for CRISPR-Cas9-induced precise gene editing in mammalian cells. Nat. Biotechnol. 33, 543-548 (2015).
[0802] 23. Maruyama, T. et al. Increasing the efficiency of precise genome editing with CRISPR-Cas9 by inhibition of nonhomologous end joining. Nat. Biotechnol. 33, 538-542 (2015).
[0803] 24. Kim, Y. B. et al. Increasing the genome-targeting scope and precision of base editing with engineered Cas9-cytidine deaminase fusions. Nat. Biotechnol. 35, 371-376 (2017).
[0804] 25. Li, X. et al. Base editing with a Cpf1-cytidine deaminase fusion. Nat. Biotechnol. 36, 324-327 (2018).
[0805] 26. Gehrke, J. M. et al. An APOBEC3A-Cas9 base editor with minimized bystander and off-target activities. Nat. Biotechnol. (2018). doi:10.1038/nbt.4199
[0806] 27. Rees, H. A. & Liu, D. R. Base editing: precision chemistry on the genome and transcriptome of living cells. Nat. Rev. Genet. 1 (2018). doi:10.1038/s41576-018-0059-1.
[0807] 28. Ostertag, E. M. & Kazazian Jr, H. H. Biology of Mammalian L1 Retrotransposons. Annu. Rev. Genet. 35, 501-538 (2001).
[0808] 29. Zimmerly, S., Guo, H., Perlman, P. S. & Lambowltz, A. M. Group II intron mobility occurs by target DNA-primed reverse transcription. Cell 82, 545-554 (1995).
[0809] 30. Luan, D. D., Korman, M. H., Jakubczak, J. L. & Eickbush, T. H. Reverse transcription of R2Bm RNA is primed by a nick at the chromosomal target site: a mechanism for non-LTR retrotransposition. Cell 72, 595-605 (1993).
[0810] 31. Feng, Q., Moran, J. V., Kazazian, H. H. & Boeke, J. D. Human L1 retrotransposon encodes a conserved endonuclease required for retrotransposition. Cell 87, 905-916 (1996).
[0811] 32. Jinek, M. et al. Structures of Cas9 Endonucleases Reveal RNA-Mediated Conformational Activation. Science 343, 1247997 (2014).
[0812] 33. Jiang, F. et al. Structures of a CRISPR-Cas9 R-loop complex primed for DNA cleavage. Science aad8282 (2016). doi:10.1126/science.aad8282
[0813] 34. Qi, L. S. et al. Repurposing CRISPR as an RNA-Guided Platform for Sequence-Specific Control of Gene Expression. Cell 152, 1173-1183 (2013).
[0814] 35. Tang, W., Hu, J. H. & Liu, D. R. Aptazyme-embedded guide RNAs enable ligand-responsive genome editing and transcriptional activation. Nat. Commun. 8, 15939 (2017).
[0815] 36. Shechner, D. M., Hacisuleyman, E., Younger, S. T. & Rinn, J. L. Multiplexable, locus-specific targeting of long RNAs with CRISPR-Display. Nat. Methods 12, 664-670 (2015).
[0816] 37. Anders, C. & Jinek, M. Chapter One—In vitro Enzymology of Cas9. in Methods in Enzymology (eds. Doudna, J. A. & Sontheimer, E. J.) 546, 1-20 (Academic Press, 2014).
[0817] 38. Briner, A. E. et al. Guide RNA Functional Modules Direct Cas9 Activity and Orthogonality. Mol. Cell 56, 333-339 (2014).
[0818] 39. Nowak, C. M., Lawson, S., Zerez, M. & Bleris, L. Guide RNA engineering for versatile Cas9 functionality. Nucleic Acids Res. 44, 9555-9564 (2016).
[0819] 40. Sternberg, S. H., Redding, S., Jinek, M., Greene, E. C. & Doudna, J. A. DNA interrogation by the CRISPR RNA-guided endonuclease Cas9. Nature 507, 62-67 (2014).
[0820] 41. Mohr, S. et al. Thermostable group II intron reverse transcriptase fusion proteins and their use in cDNA synthesis and next-generation RNA sequencing. RNA 19, 958-970 (2013).
[0821] 42. Stamos, J. L., Lentzsch, A. M. & Lambowitz, A. M. Structure of a Thermostable Group II Intron Reverse Transcriptase with Template-Primer and Its Functional and Evolutionary Implications. Mol. Cell 68, 926-939.e4 (2017).
[0822] 43. Zhao, C. & Pyle, A. M. Crystal structures of a group II intron maturase reveal a missing link in spliceosome evolution. Nat. Struct. Mol. Biol. 23, 558-565 (2016).
[0823] 44. Zhao, C., Liu, F. & Pyle, A. M. An ultraprocessive, accurate reverse transcriptase encoded by a metazoan group II intron. RNA 24, 183-195 (2018).
[0824] 45. Ran, F. A. et al. Genome engineering using the CRISPR-Cas9 system. Nat. Protoc. 8, 2281-2308 (2013).
[0825] 46. Liu, Y., Kao, H.-I. & Bambara, R. A. Flap endonuclease 1: a central component of DNA metabolism. Annu. Rev. Biochem. 73, 589-615 (2004).
[0826] 47. Krokan, H. E. & Bjsris, M. Base Excision Repair. Cold Spring Harb. Perspect. Biol. 5, (2013).
[0827] 48. Kelman, Z. PCNA: structure, functions and interactions. Oncogene 14, 629-640 (1997).
[0828] 49. Choe, K. N. & Moldovan, G.-L. Forging Ahead through Darkness: PCNA, Still the Principal Conductor at the Replication Fork. Mol. Cell 65, 380-392 (2017).
[0829] 50. Li, X., Li, J., Harrington, J., Lieber, M. R. & Burgers, P. M. Lagging strand DNA synthesis at the eukaryotic replication fork involves binding and stimulation of FEN-1 by proliferating cell nuclear antigen. J. Biol. Chem. 270, 22109-22112 (1995).
[0830] 51. Tom, S., Henricksen, L. A. & Bambara, R. A. Mechanism whereby proliferating cell nuclear antigen stimulates flap endonuclease 1. J. Biol. Chem. 275, 10498-10505 (2000).
[0831] 52. Tanenbaum, M. E., Gilbert, L. A., Qi, L. S., Weissman, J. S. & Vale, R. D. A protein-tagging system for signal amplification in gene expression and fluorescence imaging. Cell 159, 635-646 (2014).
[0832] 53. Bertrand, E. et al. Localization of ASHI mRNA particles in living yeast. Mol. Cell 2, 437-445 (1998).
[0833] 54. Dahlman, J. E. et al. Orthogonal gene knockout and activation with a catalytically active Cas9 nuclease. Nat. Biotechnol. 33, 1159-1161 (2015).
[0834] 55. Tsai, S. Q. et al. GUIDE-seq enables genome-wide profiling of off-target cleavage by CRISPR-Cas nucleases. Nat. Biotechnol. 33, 187-197 (2015).
[0835] 56. Tsai, S. Q. et al. CIRCLE-seq: a highly sensitive in vitro screen for genome-wide CRISPR-Cas9 nuclease off-targets. Nat. Methods 14, 607-614 (2017).
[0836] 57. Schek N, Cooke C, Alwine J C. Molecular and Cellular Biology. (1992).
[0837] 58. Gil A, Proudfoot N J. Cell. (1987).
[0838] 59. Zhao, B. S., Roundtree, I. A., He, C. Nat Rev Mol Cell Biol. (2017).
[0839] 60. Rubio, M. A. T., Hopper, A. K. Wiley Interdiscip Rev RNA (2011).
[0840] 61. Shechner, D. M., Hacisuleyman E., Younger, S. T., Rinn, J. L. Nat Methods. (2015).
[0841] 62. Paige, J. S., Wu, K. Y., Jaffrey, S. R. Science (2011).
[0842] 63. Ray D., . . . Hughes T R. Nature (2013).
[0843] 64. Chadalavada, D. M., Cerrone-Szakal, A. L., Bevilacqua, P. C. RNA (2007).
[0844] 65. Forster A C, Symons R H. Cell. (1987).
[0845] 66. Weinberg Z, Kim P B, Chen T H, Li S, Harris K A, Lunse C E, Breaker R R. Nat. Chem. Biol. (2015).
[0846] 67. Feldstein P A, Buzayan J M, Bruening G. Gene (1989).
[0847] 68. Saville B J, Collins R A. Cell. (1990).
[0848] 69. Winkler W C, Nahvi A, Roth A, Collins J A, Breaker R R. Nature (2004).
[0849] 70. Roth A, Weinberg Z, Chen A G, Kim P G, Ames T D, Breaker R R. Nat Chem Biol. (2013).
[0850] 71. Choudhury R, Tsai Y S, Dominguez D, Wang Y, Wang Z. Nat Commun. (2012).
[0851] 72. MacRae I J, Doudna J A. Curr Opin Struct Biol. (2007).
[0852] 73. Bernstein E, Caudy A A, Hammond S M, Hannon G J Nature (2001).
[0853] 74. Filippov V, Solovyev V, Filippova M, Gill S S. Gene (2000).
[0854] 75. Cadwell R C and Joyce G F. PCR Methods Appl. (1992).
[0855] 76. McInerney P, Adams P, and Hadi M Z. Mol Biol Int. (2014).
[0856] 77. Esvelt K M, Carlson J C, and Liu D R. Nature. (2011).
[0857] 78. Naorem S S, Hin J, Wang S, Lee W R, Heng X, Miller J F, Guo H. Proc Natl Acad Sci USA (2017).
[0858] 79. Martinez M A, Vartanian J P, Wain-Hobson S. Proc Natl Acad Sci USA (1994).
[0859] 80. Meyer A J, Ellefson J W, Ellington A D. Curr Protoc Mol Biol. (2014).
[0860] 81. Wang H H, Isaacs F J, Carr P A, Sun Z Z, Xu G, Forest C R, Church G M. Nature. (2009).
[0861] 82. Nyerges Á et al. Proc Natl Acad Sci USA. (2016).
[0862] 83. Mascola J R, Haynes B F. Immunol Rev. (2013).
[0863] 84. X. Wen, K. Wen, D. Cao, G. Li, R. W. Jones, J. Li, S. Szu, Y. Hoshino, L. Yuan, Inclusion of a universal tetanus toxoid CD4(+) T cell epitope P2 significantly enhanced the immunogenicity of recombinant rotavirus ΔVP8* subunit parenteral vaccines. Vaccine 32, 4420-4427 (2014).
[0864] 85. G. Ada, D. Isaacs, Carbohydrate-protein conjugate vaccines. Clin Microbiol Infect 9, 79-85 (2003).
[0865] 86. E. Malito, B. Bursulaya, C. Chen, P. L. Surdo, M. Picchianti, E. Balducci, M. Biancucci, A. Brock, F. Berti, M. J. Bottomley, M. Nissum, P. Costantino, R. Rappuoli, G. Spraggon, Structural basis for lack of toxicity of the diphtheria toxin mutant CRM197. Proceedings of the National Academy of Sciences 109, 5229 (2012).
[0866] 87. J. de Wit, M. E. Emmelot, M. C. M. Poelen, J. Lanfermeijer, W. G. H. Han, C. van Els, P. Kaaijk, The Human CD4(+) T Cell Response against Mumps Virus Targets a Broadly Recognized Nucleoprotein Epitope. J Virol 93, (2019).
[0867] 88. M. May, C. A. Rieder, R. J. Rowe, Emergent lineages of mumps virus suggest the need for a polyvalent vaccine. Int J Infect Dis 66, 1-4 (2018).
[0868] 89. M. Ramamurthy, P. Rajendiran, N. Saravanan, S. Sankar, S. Gopalan, B. Nandagopal, Identification of immunogenic B-cell epitope peptides of rubella virus E1 glycoprotein towards development of highly specific immunoassays and/or vaccine. Conference Abstract, (2019).
[0869] 90. U. S. F. Tambunan, F. R. P. Sipahutar, A. A. Parikesit, D. Kerami, Vaccine Design for H5N1 Based on B- and T-cell Epitope Predictions. Bioinform Biol Insights 10, 27-35 (2016).
[0870] 91. Asante, E A. et. al. “A naturally occurring variant of the human prion protein completely prevents prion disease”. Nature. (2015).
[0871] 92. Crabtree, G. R. & Schreiber, S. L. Three-part inventions: intracellular signaling and induced proximity. Trends Biochem. Sci. 21, 418-22 (1996).
[0872] 93. Liu, J. et al. Calcineurin Is a Common Target of A and FKBP-FK506 Complexes. Cell 66, 807-815 (1991).
[0873] 94. Keith, C. T. et al. A mammalian protein targeted by GI-arresting rapamycin-receptor complex. Nature 369, 756-758 (2003).
[0874] 95. Spencer, D. M., Wandless, T. J., Schreiber, S. L. S. & Crabtree, G. R. Controlling signal transduction with synthetic ligands. Science 262, 1019-24 (1993).
[0875] 96. Pruschy, M. N. et al. Mechanistic studies of a signaling pathway activated by the organic dimerizer FK1012. Chem. Biol. 1, 163-172 (1994).
[0876] 97. Spencer, D. M. et al. Functional analysis of Fas signaling in vivo using synthetic inducers of dimerization. Curr. Biol. 6, 839-847 (1996).
[0877] 98. Belshaw, P. J., Spencer, D. M., Crabtree, G. R. & Schreiber, S. L. Controlling programmed cell death with a cyclophilin-cyclosporin-based chemical inducer of dimerization. Chem. Biol. 3, 731-738 (1996).
[0878] 99. Yang, J. X., Symes, K., Mercola, M. & Schreiber, S. L. Small-molecule control of insulin and PDGF receptor signaling and the role of membrane attachment. Curr. Biol. 8, 11-18 (1998).
[0879] 100. Belshaw, P. J., Ho, S. N., Crabtree, G. R. & Schreiber, S. L. Controlling protein association and subcellular localization with a synthetic ligand that induces heterodimerization of proteins. Proc. Natl. Acad. Sci. 93, 4604-4607 (2002).
[0880] 101. Stockwell, B. R. & Schreiber, S. L. Probing the role of homomeric and heteromeric receptor interactions in TGF-β signaling using small molecule dimerizers. Curr. Biol. 8, 761-773 (2004).
[0881] 102. Spencer, D. M., Graef, I., Austin, D. J., Schreiber, S. L. & Crabtree, G. R. A general strategy for producing conditional alleles of Src-like tyrosine kinases. Proc. Natl. Acad. Sci. 92, 9805-9809 (2006).
[0882] 103. Holsinger, L. J., Spencer, D. M., Austin, D. J., Schreiber, S. L. & Crabtree, G. R. Signal transduction in T lymphocytes using a conditional allele of Sos. Proc. Natl. Acad. Sci. 92, 9810-9814 (2006).
[0883] 104. Myers, M. G. Insulin Signal Transduction and the IRS Proteins. Annu. Rev. Pharmacol. Toxicol. 36, 615-658 (1996).
[0884] 105. Watowich, S. S. The erythropoietin receptor: Molecular structure and hematopoietic signaling pathways. J. Investig. Med. 59, 1067-1072 (2011).
[0885] 106. Blau, C. A., Peterson, K. R., Drachman, J. G. & Spencer, D. M. A proliferation switch for genetically modified cells. Proc. Natl. Acad. Sci. 94, 3076-3081 (2002).
[0886] 107. Clackson, T. et al. Redesigning an FKBP-ligand interface to generate chemical dimerizers with novel specificity. Proc. Natl. Acad. Sci. 95, 10437-10442 (1998).
[0887] 108. Diver, S. T. & Schreiber, S. L. Single-step synthesis of cell-permeable protein dimerizers that activate signal transduction and gene expression. J. Am. Chem. Soc. 119, 5106-5109 (1997).
[0888] 109. Guo, Z. F., Zhang, R. & Liang, F. Sen. Facile functionalization of FK506 for biological studies by the thiol-ene ‘click’ reaction. RSC Adv. 4, 11400-11403 (2014).
[0889] 110. Robinson, D. R., Wu, Y.-M. & Lin, S.-F. The protein tyrosine kinase family of the human genome. Oncogene 19, 5548-5557 (2000).

### EQUIVALENTS AND SCOPE

[0890] In the claims articles such as “a,” “an,” and “the” may mean one or more than one unless indicated to the contrary or otherwise evident from the context. Claims or descriptions that include “or” between one or more members of a group are considered satisfied if one, more than one, or all of the group members are present in, employed in, or otherwise relevant to a given product or process unless indicated to the contrary or otherwise evident from the context. The invention includes embodiments in which exactly one member of the group is present in, employed in, or otherwise relevant to a given product or process. The invention includes embodiments in which more than one, or all of the group members are present in, employed in, or otherwise relevant to a given product or process.

[0891] Furthermore, the invention encompasses all variations, combinations, and permutations in which one or more limitations, elements, clauses, and descriptive terms from one or more of the listed claims is introduced into another claim. For example, any claim that is dependent on another claim can be modified to include one or more limitations found in any other claim that is dependent on the same base claim. Where elements are presented as lists, e.g., in Markush group format, each subgroup of the elements is also disclosed, and any element(s) can be removed from the group. It should it be understood that, in general, where the invention, or aspects of the invention, is/are referred to as comprising particular elements and/or features, certain embodiments of the invention or aspects of the invention consist, or consist essentially of, such elements and/or features. For purposes of simplicity, those embodiments have not been specifically set forth in haec verba herein. It is also noted that the terms “comprising” and “containing” are intended to be open and permits the inclusion of additional elements or steps. Where ranges are given, endpoints are included. Furthermore, unless otherwise indicated or otherwise evident from the context and understanding of one of ordinary skill in the art, values that are expressed as ranges can assume any specific value or sub-range within the stated ranges in different embodiments of the invention, to the tenth of the unit of the lower limit of the range, unless the context clearly dictates otherwise.

[0892] This application refers to various issued patents, published patent applications, journal articles, and other publications, all of which are incorporated herein by reference. If there is a conflict between any of the incorporated references and the instant specification, the specification shall control. In addition, any particular embodiment of the present invention that falls within the prior art may be explicitly excluded from any one or more of the claims. Because such embodiments are deemed to be known to one of ordinary skill in the art, they may be excluded even if the exclusion is not set forth explicitly herein. Any particular embodiment of the invention can be excluded from any claim, for any reason, whether or not related to the existence of prior art.

[0893] Those skilled in the art will recognize or be able to ascertain using no more than routine experimentation many equivalents to the specific embodiments described herein. The scope of the present embodiments described herein is not intended to be limited to the above Description, but rather is as set forth in the appended claims. Those of ordinary skill in the art will appreciate that various changes and modifications to this description may be made without departing from the spirit or scope of the present invention, as defined in the following claims.

1. A non-naturally occurring polypeptide DddA variant comprising an amino acid sequence of any one of SEQ ID NOs: 28-54, or an amino acid sequence having at least 85%, 90%, 95%, 96%, 97%, 98%, 99%, or 100% sequence identity with any of SEQ ID NOs: 28-54.

2. The non-naturally occurring polypeptide DddA variant of claim 1 which corresponds to an N-terminal half of the canonical DddA protein.

3. The non-naturally occurring polypeptide DddA variant of claim 1 which corresponds to an C-terminal half of the canonical DddA protein.

4. The non-naturally occurring polypeptide DddA variant of claim 1, wherein the variant is derived from a starter DddA protein using a continuous evolution process.

5. The non-naturally occurring polypeptide DddA variant of claim 4, wherein the continuous evolution process is PACE.

6. The non-naturally occurring polypeptide DddA variant of claim 4, wherein the starter DddA protein comprises SEQ ID NO: 25 and corresponds to the DddAtox peptide.

7. A nucleotide sequence comprising any one of the non-naturally occurring polypeptide DddA variants of claims 1-6.

8. A vector comprising the nucleotide sequence of claim 7.

9. A cell comprising the vector of claim 8.

10. A base editor comprising any one of the non-naturally occurring polypeptide DddA variants of claims 1-6.

11. A base editor comprising a heterodimer having first and second monomers, said first monomer comprising a first programmable DNA binding protein and the polypeptide DddA variant of claim 2, and said second monomer comprising a second programmable DNA binding protein and the polypeptide DddA variant of claim 3, wherein dimerization of the first and second monomers reconstitutes a double-stranded DNA deaminase activity of a complex comprising the polypeptide DddA variants of claims 2 and 3.

12. The base editor of claim 11, wherein the first and/or second programmable DNA binding protein are the same.

13. The base editor of claim 11, wherein the first and/or second programmable DNA binding protein are different.

14. The base editor of claim 11, wherein the first and/or second programmable DNA binding protein is a nucleic acid programmable DNA binding protein (napDNAbp).

15. The base editor of claim 14, wherein the napDNAbp is a Cas9 domain.

16. The base editor of claim 14, wherein the napDNAbp is a nickase.

17. The base editor of claim 14, wherein the napDNAbp comprises an inactivated nuclease activity.

18. The base editor of claim 14, wherein the napDNAbp is selected from the group consisting of: Cas9, Cas12e, Cas12d, Cas12a, Cas12b1, Cas3a, Cas12c, and Argonaute and optionally has a nickase activity.

19. The base editor of claim 14, wherein the napDNAbp comprises an amino acid sequence selected from the group consisting of SEQ ID NOs: 59-112, or an amino acid sequence having at least 90% sequence identity to an amino acid sequence selected from the group consisting of: SEQ ID NO: 59-112.

20. The base editor of claim 11, wherein the programmable DNA binding protein is a TALE protein.

21. The base editor of claim 20, wherein TALE protein comprises an amino acid sequence selected from the group consisting of SEQ ID NO: 1-12, or an amino acid sequence having at least 90% sequence identity with an amino acid sequence selected from the group consisting of SEQ ID NO: 1-12.

22. The base editor of claim 11, wherein the programmable DNA binding protein is a zinc finger protein.

23. The base editor of claim 22, wherein zinc finger protein is a commercially available zinc finger protein.

24. The base editor of claim 11, wherein the programmable DNA binding protein is a mitoTALE protein.

25. The base editor of claim 24, wherein mitoTALE protein comprises an amino acid sequence selected from the group consisting of: SEQ ID NO: 1-12, or an amino acid sequence having at least 90% sequence identity with an amino acid sequence selected from the group consisting of SEQ ID NO: 1-12.

26. The base editor of any one of claims 11-25, further comprising a linker that joins the non-naturally occurring polypeptide DddA variant with the programmable DNA binding protein.

27. The base editor of claim 26, wherein the linker comprises an amino acid sequence selected from the group consisting of: SEQ ID NOs: 202-222, or an amino acid sequence having at least 90% sequence identity to SEQ ID NO: 202-222.

28. The base editor of claim 26, wherein the linker comprises 1, 2, 3, 4, 5, 6, 7, 8, 9, 10, 11, 12, 13, 14, 15, 16, 17, 18, 19, 20, 21, 22, 23, 24, 25, 26, 27, 28, 29, 30, 31, 32, 33, 34, 35, 36, 37, 38, 39, 40, 41, 42, 43, 44, 45, 46, 47, 48, 49, or 50 amino acids.

29. The base editor of any one of claims 11-25, further comprising one or more uracil glycosylase inhibitor (UGI) domains.

30. The base editor of claim 29, wherein the one or more UGI domains comprise an amino acid sequence selected from the group consisting of: SEQ ID NOs: 377-383, or an amino acid sequence having at least 90% sequence identity to SEQ ID NOs: 377-383.

31. A method of editing a target nucleotide sequence at a target site, comprising contacting a target nucleotide sequence with a base editor of any one of claims 11-30, thereby inducing deamination of a target base at the target site.

32. The method of claim 31, wherein the target base is a C.

33. The method of claim 32, wherein the C is within a 5′-TC-3′ sequence context.

34. The method of claim 33, wherein the C is within a 5′-TCC-3′ sequence context.

35. The method of claim 31, wherein the programmable DNA binding protein of the base editor is a TALE, mitoTALE, zinc finger protein, or napDNAbp.

36. The method of claim 31, wherein the editing occurs in vivo.

37. The method of claim 31, wherein the editing occurs ex vivo.

38. The method of claim 31, wherein the target nucleotide sequence is a disease gene.

39. The method of claim 31, wherein the target nucleotide sequence is a disease gene in a mitochondria.

40. The method of claim 31, wherein the method of editing a nucleotide sequence results in the treatment of a mitochondrial disease.

The application's sequence listing, which the Patent Office published only in electronic form, follows.

SEQUENCE LISTING (1113 sequences)

SEQ ID NO: 1 - protein, 676 aa, Artificial Sequence
  Synthetic
MALSRAVCGTSRQLAPVLGYLGSRQKHSLPDYPYDVPDYAGYPYDVPDYAGYPYDVPDYAMDIADLRTLGYSQQQQEKIKPKVRSTVAQHHEALVGHGFTHAHIVALSQHPAALGTVAVKYQDMIAALPEATHEAIVGVGKQWSGARALEALLTVAGELRGPPLQLDTGQLLKIAKRGGVTAVEAVHAWRNALTGAPLNLTPQQVVAIASNNGGKQALETVQRLLPVLCQAHGLTPEQVVAIASNIGGKQALETVQALLPVLCQAHGLTPEQVVAIASHDGGKQALETVQRLLPVLCQAHGLTPEQVVAIASHDGGKQALETVQRLLPVLCQAHGLTPEQVVAIASHDGGKQALETVQRLLPVLCQAHGLTPEQVVAIASHDGGKQALETVQRLLPVLCQAHGLTPEQVVAIASHDGGKQALETVQRLLPVLCQAHGLTPEQVVAIASNIGGKQALETVQALLPVLCQAHGLTPQQVVAIASNGGGKQALETVQRLLPVLCQAHGLTPQQVVAIASNGGGRPALESIVAQLSRPDPALAALTNDHLVALACLGGRPALDAVKKGLGGSGSYALGPYQISAPQLPAYNGQTVGTFYYVNDAGGLESKVFSSGGPTPYPNYANAGHVEGQSALFMRDNGISEGLVFHNNPEGTCGFCVNMTETLLPENAKMTVVPPEG

SEQ ID NO: 2 - protein, 856 aa, Artificial Sequence
  Synthetic
MALSRAVCGTSRQLAPVLGYLGSRQKHSLPDYPYDVPDYAGYPYDVPDYAGYPYDVPDYATNLSDIIEKETGKQLVIQESILMLPEEVEEVIGNKPESDILVHTAYDESTDENVMLLTSDAPEYKPWALVIQDSNGENKIKMLSGGSGGSGGSTNLSDIIEKETGKQLVIQESILMLPEEVEEVIGNKPESDILVHTAYDESTDENVMLLTSDAPEYKPWALVIQDSNGENKIKMLSGGSMDIADLRTLGYSQQQQEKIKPKVRSTVAQHHEALVGHGFTHAHIVALSQHPAALGTVAVKYQDMIAALPEATHEAIVGVGKQWSGARALEALLTVAGELRGPPLQLDTGQLLKIAKRGGVTAVEAVHAWRNALTGAPLNLTPQQVVAIASNNGGKQALETVQRLLPVLCQAHGLTPEQVVAIASNIGGKQALETVQALLPVLCQAHGLTPEQVVAIASHDGGKQALETVQRLLPVLCQAHGLTPEQVVAIASHDGGKQALETVQRLLPVLCQAHGLTPEQVVAIASHDGGKQALETVQRLLPVLCQAHGLTPEQVVAIASHDGGKQALETVQRLLPVLCQAHGLTPEQVVAIASHDGGKQALETVQRLLPVLCQAHGLTPEQVVAIASNIGGKQALETVQALLPVLCQAHGLTPQQVVAIASNGGGKQALETVQRLLPVLCQAHGLTPQQVVAIASNGGGRPALESIVAQLSRPDPALAALTNDHLVALACLGGRPALDAVKKGLGGSGSYALGPYQISAPQLPAYNGQTVGTFYYVNDAGGLESKVFSSGGPTPYPNYANAGHVEGQSALFMRDNGISEGLVFHNNPEGTCGFCVNMTETLLPENAKMTVVPPEG

SEQ ID NO: 3 - protein, 856 aa, Artificial Sequence
  Synthetic
MALSRAVCGTSRQLAPVLGYLGSRQKHSLPDYPYDVPDYAGYPYDVPDYAGYPYDVPDYAMDIADLRTLGYSQQQQEKIKPKVRSTVAQHHEALVGHGFTHAHIVALSQHPAALGTVAVKYQDMIAALPEATHEAIVGVGKQWSGARALEALLTVAGELRGPPLQLDTGQLLKIAKRGGVTAVEAVHAWRNALTGAPLNLTPQQVVAIASNNGGKQALETVQRLLPVLCQAHGLTPEQVVAIASNIGGKQALETVQALLPVLCQAHGLTPEQVVAIASHDGGKQALETVQRLLPVLCQAHGLTPEQVVAIASHDGGKQALETVQRLLPVLCQAHGLTPEQVVAIASHDGGKQALETVQRLLPVLCQAHGLTPEQVVAIASHDGGKQALETVQRLLPVLCQAHGLTPEQVVAIASHDGGKQALETVQRLLPVLCQAHGLTPEQVVAIASNIGGKQALETVQALLPVLCQAHGLTPQQVVAIASNGGGKQALETVQRLLPVLCQAHGLTPQQVVAIASNGGGRPALESIVAQLSRPDPALAALTNDHLVALACLGGRPALDAVKKGLGGSGSYALGPYQISAPQLPAYNGQTVGTFYYVNDAGGLESKVFSSGGPTPYPNYANAGHVEGQSALFMRDNGISEGLVFHNNPEGTCGFCVNMTETLLPENAKMTVVPPEGSGGSTNLSDIIEKETGKQLVIQESILMLPEEVEEVIGNKPESDILVHTAYDESTDENVMLLTSDAPEYKPWALVIQDSNGENKIKMLSGGSGGSGGSTNLSDIIEKETGKQLVIQESILMLPEEVEEVIGNKPESDILVHTAYDESTDENVMLLTSDAPEYKPWALVIQDSNGENKIKML

SEQ ID NO: 4 - protein, 763 aa, Artificial Sequence
  Synthetic
MALSRAVCGTSRQLAPVLGYLGSRQKHSLPDYPYDVPDYAGYPYDVPDYAGYPYDVPDYATNLSDIIEKETGKQLVIQESILMLPEEVEEVIGNKPESDILVHTAYDESTDENVMLLTSDAPEYKPWALVIQDSNGENKIKMLSGGSMDIADLRTLGYSQQQQEKIKPKVRSTVAQHHEALVGHGFTHAHIVALSQHPAALGTVAVKYQDMIAALPEATHEAIVGVGKQWSGARALEALLTVAGELRGPPLQLDTGQLLKIAKRGGVTAVEAVHAWRNALTGAPLNLTPQQVVAIASNNGGKQALETVQRLLPVLCQAHGLTPEQVVAIASNIGGKQALETVQALLPVLCQAHGLTPEQVVAIASHDGGKQALETVQRLLPVLCQAHGLTPEQVVAIASHDGGKQALETVQRLLPVLCQAHGLTPEQVVAIASHDGGKQALETVQRLLPVLCQAHGLTPEQVVAIASHDGGKQALETVQRLLPVLCQAHGLTPEQVVAIASHDGGKQALETVQRLLPVLCQAHGLTPEQVVAIASNIGGKQALETVQALLPVLCQAHGLTPQQVVAIASNGGGKQALETVQRLLPVLCQAHGLTPQQVVAIASNGGGRPALESIVAQLSRPDPALAALTNDHLVALACLGGRPALDAVKKGLGGSGSYALGPYQISAPQLPAYNGQTVGTFYYVNDAGGLESKVFSSGGPTPYPNYANAGHVEGQSALFMRDNGISEGLVFHNNPEGTCGFCVNMTETLLPENAKMTVVPPEG

SEQ ID NO: 5 - protein, 763 aa, Artificial Sequence
  Synthetic
MALSRAVCGTSRQLAPVLGYLGSRQKHSLPDYPYDVPDYAGYPYDVPDYAGYPYDVPDYAMDIADLRTLGYSQQQQEKIKPKVRSTVAQHHEALVGHGFTHAHIVALSQHPAALGTVAVKYQDMIAALPEATHEAIVGVGKQWSGARALEALLTVAGELRGPPLQLDTGQLLKIAKRGGVTAVEAVHAWRNALTGAPLNLTPQQVVAIASNNGGKQALETVQRLLPVLCQAHGLTPEQVVAIASNIGGKQALETVQALLPVLCQAHGLTPEQVVAIASHDGGKQALETVQRLLPVLCQAHGLTPEQVVAIASHDGGKQALETVQRLLPVLCQAHGLTPEQVVAIASHDGGKQALETVQRLLPVLCQAHGLTPEQVVAIASHDGGKQALETVQRLLPVLCQAHGLTPEQVVAIASHDGGKQALETVQRLLPVLCQAHGLTPEQVVAIASNIGGKQALETVQALLPVLCQAHGLTPQQVVAIASNGGGKQALETVQRLLPVLCQAHGLTPQQVVAIASNGGGRPALESIVAQLSRPDPALAALTNDHLVALACLGGRPALDAVKKGLGGSGSYALGPYQISAPQLPAYNGQTVGTFYYVNDAGGLESKVFSSGGPTPYPNYANAGHVEGQSALFMRDNGISEGLVFHNNPEGTCGFCVNMTETLLPENAKMTVVPPEGSGGSTNLSDIIEKETGKQLVIQESILMLPEEVEEVIGNKPESDILVHTAYDESTDENVMLLTSDAPEYKPWALVIQDSNGENKIKML

SEQ ID NO: 6 - protein, 624 aa, Artificial Sequence
  Synthetic
MASVLTPLLLRGLTGSARRLPVPRAKIHSLDYKDHDGDYKDHDIDYKDDDDKMDIADLRTLGYSQQQQEKIKPKVRSTVAQHHEALVGHGFTHAHIVALSQHPAALGTVAVKYQDMIAALPEATHEAIVGVGKRGAGARALEALLTVAGELRGPPLQLDTGQLLKIAKRGGVTAVEAVHAWRNALTGAPLNLTPQQVVAIASNNGGKQALETVQRLLPVLCQAHGLTPEQVVAIASNIGGKQALETVQALLPVLCQAHGLTPQQVVAIASNGGGKQALETVQRLLPVLCQAHGLTPQQVVAIASNNGGKQALETVQRLLPVLCQAHGLTPQQVVAIASNNGGKQALETVQRLLPVLCQAHGLTPEQVVAIASHDGGKQALETVQRLLPVLCQAHGLTPQQVVAIASNGGGKQALETVQRLLPVLCQAHGLTPEQVVAIASNIGGKQALETVQALLPVLCQAHGLTPQQVVAIASNGGGKQALETVQRLLPVLCQAHGLTPQQVVAIASNGGGKQALETVQRLLPVLCQAHGLTPQQVVAIASNGGGRPALESIVAQLSRPDPALAALTNDHLVALACLGGRPALDAVKKGLGGSAIPVKRGATGETKVFTGNSNSPKSPTKGGC

SEQ ID NO: 7 - protein, 804 aa, Artificial Sequence
  Synthetic
MASVLTPLLLRGLTGSARRLPVPRAKIHSLDYKDHDGDYKDHDIDYKDDDDKTNLSDIIEKETGKQLVIQESILMLPEEVEEVIGNKPESDILVHTAYDESTDENVMLLTSDAPEYKPWALVIQDSNGENKIKMLSGGSGGSGGSTNLSDIIEKETGKQLVIQESILMLPEEVEEVIGNKPESDILVHTAYDESTDENVMLLTSDAPEYKPWALVIQDSNGENKIKMLSGGSMDIADLRTLGYSQQQQEKIKPKVRSTVAQHHEALVGHGFTHAHIVALSQHPAALGTVAVKYQDMIAALPEATHEAIVGVGKRGAGARALEALLTVAGELRGPPLQLDTGQLLKIAKRGGVTAVEAVHAWRNALTGAPLNLTPQQVVAIASNNGGKQALETVQRLLPVLCQAHGLTPEQVVAIASNIGGKQALETVQALLPVLCQAHGLTPQQVVAIASNGGGKQALETVQRLLPVLCQAHGLTPQQVVAIASNNGGKQALETVQRLLPVLCQAHGLTPQQVVAIASNNGGKQALETVQRLLPVLCQAHGLTPEQVVAIASHDGGKQALETVQRLLPVLCQAHGLTPQQVVAIASNGGGKQALETVQRLLPVLCQAHGLTPEQVVAIASNIGGKQALETVQALLPVLCQAHGLTPQQVVAIASNGGGKQALETVQRLLPVLCQAHGLTPQQVVAIASNGGGKQALETVQRLLPVLCQAHGLTPQQVVAIASNGGGRPALESIVAQLSRPDPALAALTNDHLVALACLGGRPALDAVKKGLGGSAIPVKRGATGETKVFTGNSNSPKSPTKGGC

SEQ ID NO: 8 - protein, 804 aa, Artificial Sequence
  Synthetic
MASVLTPLLLRGLTGSARRLPVPRAKIHSLDYKDHDGDYKDHDIDYKDDDDKMDIADLRTLGYSQQQQEKIKPKVRSTVAQHHEALVGHGFTHAHIVALSQHPAALGTVAVKYQDMIAALPEATHEAIVGVGKRGAGARALEALLTVAGELRGPPLQLDTGQLLKIAKRGGVTAVEAVHAWRNALTGAPLNLTPQQVVAIASNNGGKQALETVQRLLPVLCQAHGLTPEQVVAIASNIGGKQALETVQALLPVLCQAHGLTPQQVVAIASNGGGKQALETVQRLLPVLCQAHGLTPQQVVAIASNNGGKQALETVQRLLPVLCQAHGLTPQQVVAIASNNGGKQALETVQRLLPVLCQAHGLTPEQVVAIASHDGGKQALETVQRLLPVLCQAHGLTPQQVVAIASNGGGKQALETVQRLLPVLCQAHGLTPEQVVAIASNIGGKQALETVQALLPVLCQAHGLTPQQVVAIASNGGGKQALETVQRLLPVLCQAHGLTPQQVVAIASNGGGKQALETVQRLLPVLCQAHGLTPQQVVAIASNGGGRPALESIVAQLSRPDPALAALTNDHLVALACLGGRPALDAVKKGLGGSAIPVKRGATGETKVFTGNSNSPKSPTKGGCSGGSTNLSDIIEKETGKQLVIQESILMLPEEVEEVIGNKPESDILVHTAYDESTDENVMLLTSDAPEYKPWALVIQDSNGENKIKMLSGGSGGSGGSTNLSDIIEKETGKQLVIQESILMLPEEVEEVIGNKPESDILVHTAYDESTDENVMLLTSDAPEYKPWALVIQDSNGENKIKML

SEQ ID NO: 9 - protein, 711 aa, Artificial Sequence
  Synthetic
MASVLTPLLLRGLTGSARRLPVPRAKIHSLDYKDHDGDYKDHDIDYKDDDDKTNLSDIIEKETGKQLVIQESILMLPEEVEEVIGNKPESDILVHTAYDESTDENVMLLTSDAPEYKPWALVIQDSNGENKIKMLSGGSMDIADLRTLGYSQQQQEKIKPKVRSTVAQHHEALVGHGFTHAHIVALSQHPAALGTVAVKYQDMIAALPEATHEAIVGVGKRGAGARALEALLTVAGELRGPPLQLDTGQLLKIAKRGGVTAVEAVHAWRNALTGAPLNLTPQQVVAIASNNGGKQALETVQRLLPVLCQAHGLTPEQVVAIASNIGGKQALETVQALLPVLCQAHGLTPQQVVAIASNGGGKQALETVQRLLPVLCQAHGLTPQQVVAIASNNGGKQALETVQRLLPVLCQAHGLTPQQVVAIASNNGGKQALETVQRLLPVLCQAHGLTPEQVVAIASHDGGKQALETVQRLLPVLCQAHGLTPQQVVAIASNGGGKQALETVQRLLPVLCQAHGLTPEQVVAIASNIGGKQALETVQALLPVLCQAHGLTPQQVVAIASNGGGKQALETVQRLLPVLCQAHGLTPQQVVAIASNGGGKQALETVQRLLPVLCQAHGLTPQQVVAIASNGGGRPALESIVAQLSRPDPALAALTNDHLVALACLGGRPALDAVKKGLGGSAIPVKRGATGETKVFTGNSNSPKSPTKGGC

SEQ ID NO: 10 - protein, 711 aa, Artificial Sequence
  Synthetic
MASVLTPLLLRGLTGSARRLPVPRAKIHSLDYKDHDGDYKDHDIDYKDDDDKMDIADLRTLGYSQQQQEKIKPKVRSTVAQHHEALVGHGFTHAHIVALSQHPAALGTVAVKYQDMIAALPEATHEAIVGVGKRGAGARALEALLTVAGELRGPPLQLDTGQLLKIAKRGGVTAVEAVHAWRNALTGAPLNLTPQQVVAIASNNGGKQALETVQRLLPVLCQAHGLTPEQVVAIASNIGGKQALETVQALLPVLCQAHGLTPQQVVAIASNGGGKQALETVQRLLPVLCQAHGLTPQQVVAIASNNGGKQALETVQRLLPVLCQAHGLTPQQVVAIASNNGGKQALETVQRLLPVLCQAHGLTPEQVVAIASHDGGKQALETVQRLLPVLCQAHGLTPQQVVAIASNGGGKQALETVQRLLPVLCQAHGLTPEQVVAIASNIGGKQALETVQALLPVLCQAHGLTPQQVVAIASNGGGKQALETVQRLLPVLCQAHGLTPQQVVAIASNGGGKQALETVQRLLPVLCQAHGLTPQQVVAIASNGGGRPALESIVAQLSRPDPALAALTNDHLVALACLGGRPALDAVKKGLGGSAIPVKRGATGETKVFTGNSNSPKSPTKGGCSGGSTNLSDIIEKETGKQLVIQESILMLPEEVEEVIGNKPESDILVHTAYDESTDENVMLLTSDAPEYKPWALVIQDSNGENKIKML

SEQ ID NO: 11 - protein, 607 aa, Artificial Sequence
  Synthetic
DIADLRTLGYSQQQQEKIKPKVRSTVAQHHEALVGHGFTHAHIVALSQHPAALGTVAVKYQDMIAALPEATHEAIVGVGKQWSGARALEALLTVAGELRGPPLQLDTGQLLKIAKRGGVTAVEAVHAWRNALTGAPLNLTPQQVVAIASHDGGKQALETVQRLLPVLCQAHGLTPEQVVAIASNGGGKQALETVQRLLPVLCQAHGLTPQQVVAIASNGGGKQALETVQRLLPVLCQAHGLTPEQVVAIASNGGGKQALETVQALLPVLCQAHGLTPQQVVAIASNNGGKQALETVQRLLPVLCQAHGLTPQQVVAIASNNGGKQALETVQRLLPVLCQAHGLTPEQVVAIASNIGGKQALETVQRLLPVLCQAHGLTPQQVVAIASNNGGKQALETVQRLLPVLCQAHGLTPQQVVAIASNGGGKQALETVQRLLPVLCQAHGLTPEQVVAIASNIGGKQALETVQRLLPVLCQAHGLTPEQVVAIASNNGGKQALETVQRLLPVLCQAHGLTPQQVVAIASNIGGKQALETVQRLLPVLCQAHGLTPQQVVAIASNIGGRPALESIVAQLSRPDPALAALTNDHLVALACLGGRPALDAVKKGLG

SEQ ID NO: 12 - protein, 573 aa, Artificial Sequence
  Synthetic
DIADLRTLGYSQQQQEKIKPKVRSTVAQHHEALVGHGFTHAHIVALSQHPAALGTVAVKYQDMIAALPEATHEAIVGVGKQWSGARALEALLTVAGELRGPPLQLDTGQLLKIAKRGGVTAVEAVHAWRNALTGAPLNLTPQQVVAIASNIGGKQALETVQRLLPVLCQAHGLTPEQVVAIASNGGGKQALETVQRLLPVLCQAHGLTPQQVVAIASNNGGKQALETVQRLLPVLCQAHGLTPEQVVAIASNNGGKQALETVQALLPVLCQAHGLTPQQVVAIASNNGGKQALETVQRLLPVLCQAHGLTPQQVVAIASHDGGKQALETVQRLLPVLCQAHGLTPEQVVAIASNGGGKQALETVQRLLPVLCQAHGLTPQQVVAIASNGGGKQALETVQRLLPVLCQAHGLTPQQVVAIASNGGGKQALETVQRLLPVLCQAHGLTPEQVVAIASNNGGKQALETVQRLLPVLCQAHGLTPEQVVAIASNNGGKQALETVQRLLPVLCQAHGLTPQQVVAIASNGGGRPALESIVAQLSRPDPALAALTNDHLVALACLGGRPALDAVKKGLG

SEQ ID NO: 13 - protein, 30 aa, Artificial Sequence
  Synthetic
MLSRAVCGTSRQLAPVLGYLGSRQKHSLPD

SEQ ID NO: 14 - protein, 29 aa, Artificial Sequence
  Synthetic
MSVLTPLLLRGLTGSARRLPVPRAKIHSL

SEQ ID NO: 15 - DNA, 214 bp, Artificial Sequence
  Synthetic
accacgatcgttatgctgatcataccctaatgatcccagcaagataatgtcctgtcttctaagatgtgcatcaagcctggtacatactgaaaaccctataaggtcctggataatttttgtttgattattcattgaagaaacatttattttccaattgtgtgaagtttttgactgttaataaaagaatctgtcaaccatcaaaaaaaaaaaaaaa

SEQ ID NO: 16 - protein, 1427 aa, Unknown
  Synthetic
MYEAARVTDPIDHTSALAGFLVGAVLGIALIAAVAFATFTCGFGVALLAGMMAGIGAQALLSIGESIGKMFSSQSGNIITGSPDVYVNSLSAAYATLSGVACSKHNPIPLVAQGSTNIFINGRPAARKDDKITCGATIGDGSHDTFFHGGTQTYLPVDDEVPPWLRTATDWAFTLAGLVGGLGGLLKASGGLSRAVLPCAAKFIGGYVLGEAFGRYVAGPAINKAIGGLFGNPIDVTTGRKILLAESETDYVIPSPLPVAIKRFYSSGIDYAGTLGRGWVLPWEIRLHARDGRLWYTDAQGRESGFPMLRAGQAAFSEADQRYLTRTPDGRYILHDLGERYYDFGQYDPESGRIAWVRRVEDQAGQWYQFERDSRGRVTEILTCGGLRAVLDYETVFGRLGTVTLVHEDERRLAVTYGYDENGQLASVTDANGAVVRQFAYTNGLMTSHMNALGFTSSYVWSKIEGEPRVVETHTSEGENWTFEYDVAGRQTRVRHADGRTAHWRFDAQSQIVEYTDLDGAFYRIKYDAVGMPVMLMLPGDRTVMFEYDDAGRIIAETDPLGRTTRTRYDGNSLRPVEVVGPDGGAWRVEYDQQGRVVSNQDSLGRENRYEYPKALTALPSAHIDALGGRKTLEWNSLGKLVGYTDCSGKTTRTSFDAFGRICSRENALGQRITYDVRPTGEPRRVTYPDGSSETFEYDAAGTLVRYIGLGGRVQELLRNARGQLIEAVDPAGRRVQYRYDVEGRLRELQQDHARYTFTYSAGGRLLTETRPDGILRRFEYGEAGELLGLDIVGAPDPHATGNRSVRTIRFERDRMGVLKVQRTPTEVTRYQHDKGDRLVKVERVPTPSGIALGIVPDAVEFEYDKGGRLVAEHGSNGSVIYTLDELDNVVSLGLPHDQTLQMLRYGSGHVHQIRFGDQVVADFERDDLHREVSRTQGRLTQRSGYDPLGRKVWQSAGIDPEMLGRGSGQLWRNYGYDAAGDLIETSDSLRGSTRFSYDPAGRLISRANPLDRKFEEFAWDAAGNLLDDAQRKSRGYVEGNRLLMWQDLRFEYDPFGNLATKRRGANQTQRFTYDGQDRLITVHTQDVRGVVETRFAYDPLGRRIAKTDTAFDLRGMKLRAETKRFVWEGLRLVQEVRETGVSSYVYSPDAPYSPVARADTVMAEALAATVIDSAKRAARIFHFHTDPVGAPQEVTDEAGEVAWAGQYAAWGKVEATNRGVTAARTDQPLRFAGQYADDSTGLHYNTFRFYDPDVGRFINQDPIGLNGGANVYHYAPNPVGWVDPWGLAGSYALGPYQISAPQLPAYNGQTVGTFYYVNDAGGLESKVFSSGGPTPYPNYANAGHVEGQSALFMRDNGISEGLVFHNNPEGTCGFCVNMTETLLPENAKMTVVPPEGAIPVKRGATGETKVFTGNSNSPKSPTKGGC

SEQ ID NO: 17 - protein, 413 aa, Artificial Sequence
  Synthetic
CLAEGTRIFDPVTGTTHRIEDVVDGRKPIHVVAAAKDGTLLARPVVSWFDQGTRDVIGLRIAGGAIVWATPDHKVLTEYGWRAAGELRKGDRVAGPGGSGNSLALSLTADQMVSALLDAEPPILYSEYDPTSPFSEASMMGLLTNLADRELVHMINWAKRVPGFVDLTLHDQAHLLECAWLEILMIGLVWRSMEHPGKLLFAPNLLLDRNQGKCVEGMVEIFDMLLATSSRFRMMNLQGEEFVCLKSIILLNSGVYTFLSSTLKSLEEKDHIHRALDKITDTLIHLMAKAGLTLQQQHQRLAQLLLILSHIRHMSNKGMEHLYSMKYKNVVPLYDLLLEMLDAHRLHAGGSGASRVQAFADALDDKFLHDMLAEELRYSVIREVLPTRRARTFDLEVEELHTLVAEGVVVHNC

SEQ ID NO: 18 - protein, 413 aa, Artificial Sequence
  Synthetic
CLAEGTRIFDPVTGTTHRIEDVVDGRKPIHVVAVAKDGTLLARPVVSWFDQGTRDVIGLRIAGGAIVWATPDHKVLTEYGWRAAGELRKGDRVAGPGGSGNSLALSLTADQMVSALLDAEPPILYSEYDPTSPFSEASMMGLLTNLADRELVHMINWAKRVPGFVDLTLHDQAHLLECAWLEILMIGLVWRSMEHPGKLLFAPNLLLDRNQGKCVEGMVEIFDMLLATSSRFRMMNLQGEEFVCLKSIILLNSGVYTFLSSTLKSLEEKDHIHRALDKITDTLIHLMAKAGLTLQQQHQRLAQLLLILSHIRHMSNKGMEHLYSMKYTNVVPLYDLLLEMLDAHRLHAGGSGASRVQAFADALDDKFLHDMLAEELRYSVIREVLPTRRARTFDLEVEELHTLVAEGVVVHNC

SEQ ID NO: 19 - protein, 413 aa, Artificial Sequence
  Synthetic
CLAEGTRIFDPVTGTTHRIEDVVDGRKPIHVVAAAKDGTLLARPVVSWFDQGTRDVIGLRIAGGATVWATPDHKVLTEYGWRAAGELRKGDRVAGPGGSGNSLALSLTADQMVSALLDAEPPIPYSEYDPTSPFSEASMMGLLTNLADRELVHMINWAKRVPGFVDLTLHDQAHLLECAWLEILMIGLVWRSMEHPGKLLFAPNLLLDRNQGKCVEGMVEIFDMLLATSSRFRMMNLQGEEFVCLKSIILLNSGVYTFLSSTLKSLEEKDHIHRALDKITDTLIHLMAKAGLTLQQQHQRLAQLLLILSHIRHMSNKGMEHLYSMKYKNVVPLYDLLLEMLDAHRLHAGGSGASRVQAFADALDDKFLHDMLAEGLRYSVIREVLPTRRARTFDLEVEELHTLVAEGVVVHNC

SEQ ID NO: 20 - protein, 413 aa, Artificial Sequence
  Synthetic
CLAEGTRIFDPVTGTTHRIEDVVDGRKPIHVVAAAKDGTLLARPVVSWFDQGTRDVIGLRIAGGATVWATPDHKVLTEYGWRAAGELRKGDRVAGPGGSGNSLALSLTADQMVSALLDAEPPILYSEYDPTSPFSEASMMGLLTNLADRELVHMINWAKRVPGFVDLTLHDQAHLLECAWLEILMIGLVWRSMEHPGKLLFAPNLLLDRNQGKCVEGMVEIFDMLLATSSRFRMMNLQGEEFVCLKSIILLNSGVYTFLSSTLKSLEEKDHIHRALDKITDTLIHLMAKAGLTLQQQHQRLAQLLLILSHIRHMSNKGMEHLYSMKYKNVVPLYDLLLEMLDAHRLHAGGSGASRVQAFADALDDKFLHDMLAEELRYSVIREVLPTRRARTFDLEVEELHTLVAEGVVVHNC

SEQ ID NO: 21 - protein, 413 aa, Artificial Sequence
  Synthetic
CLAEGTRIFDPVTGTTHRIEDVVDGRKPIHVVAAAKDGTLLARPVVSWFDQGTRDVIGLRIAGGATVWATPDHKVLTEYGWRAAGELRKGDRVAGPGGSGNSLALSLTADQMVSALLDAEPPIPYSEYDPTSPFSEASMMGLLTNLADRELVHMINWAKRVPGFVDLTLHDQAHLLECAWLEILMIGLVWRSMEHPGKLLFAPNLLLDRNQGKCVEGMVEIFDMLLATSSRFRMMNLQGEEFVCLKSIILLNSGVYTFLSSTLKSLEEKDHIHRALDKITDTLIHLMAKAGLTLQQQHQRLAQLLLILSHIRHMSNKGMEHLYSMKYKNVVPLYDLLLEMLDAHRLHAGGSGASRVQAFADALDDKFLHDMLAEELRYSVIREVLPTRRARTFDLEVEELHTLVAEGVVVHNC

SEQ ID NO: 22 - protein, 413 aa, Artificial Sequence
  Synthetic
CLAEGTRIFDPVTGTTHRIEDVVDGRKPIHVVAAAKDGTLLARPVVSWFDQGTRDVIGLRIAGGATVWATPDHKVLTEYGWRAAGELRKGDRVAGPGGSGNSLALSLTADQMVSALLDAEPPILYSEYNPTSPFSEASMMGLLTNLADRELVHMINWAKRVPGFVDLTLHDQAHLLERAWLEILMIGLVWRSMEHPGKLLFAPNLLLDRNQGKCVEGMVEIFDMLLATSSRFRMMNLQGEEFVCLKSIILLNSGVYTFLSSTLKSLEEKDHIHRALDKITDTLIHLMAKAGLTLQQQHQRLAQLLLILSHIRHMSNKGMEHLYSMKYKNVVPLYDLLLEMLDAHRLHAGGSGASRVQAFADALDDKFLHDMLAEGLRYSVIREVLPTRRARTFDLEVEELHTLVAEGVVVHNC

SEQ ID NO: 23 - protein, 413 aa, Artificial Sequence
  Synthetic
CLAEGTRIFDPVTGTTHRIEDVVDGRKPIHVVAAAKDGTLLARPVVSWFDQGTRDVIGLRIAGGAIVWATPDHKVLTEYGWRAAGELRKGDRVAGPGGSGNSLALSLTADQMVSALLDAEPPILYSEYDPTSPFSEASMMGLLTNLADRELVHMINWAKRVPGFVDLTLHDQAHLLERAWLEILMIGLVWRSMEHPGKLLFAPNLLLDRNQGKCVEGMVEIFDMLLATSSRFRMMNLQGEEFVCLKSIILLNSGVYTFLSSTLKSLEEKDHIHRALDKITDTLIHLMAKAGLTLQQQHQRLAQLLLILSHIRHMSNKGMEHLYSMKYKNVVPLYDLLLEMLDAHRLHAGGSGASRVQAFADALDDKFLHDMLAEGLRYSVIREVLPTRRARTFDLEVEELHTLVAEGVVVHNC

SEQ ID NO: 24 - protein, 413 aa, Artificial Sequence
  Synthetic
CLAEGTRIFDPVTGTTHRIEDVVDGRKPIHVVAVAKDGTLLARPVVSWFDQGTRDVIGLRIAGGATVWATPDHKVLTEYGWRAAGELRKGDRVAGPGGSGNSLALSLTADQMVSALLDAEPPILYSEYDPTSPFSEASMMGLLTNLADRELVHMINWAKRVPGFVDLTLHDQAHLLERAWLEILMIGLVWRSMEHPGKLLFAPNLLLDRNQGKCVEGMVEIFDMLLATSSRFRMMNLQGEEFVCLKSIILLNSGVYTFLSSTLKSLEEKDHIHRALDKITDTLIHLMAKAGLTLQQQHQRLAQLLLILSHIRHMSNKGMEHLYSMKYKNVVPLYDLLLEMLDAHRLHAGGSGASRVQAFADALDDKFLHDMLAEELRYSVIREVLPTRRARTFDLEVEELHTLVAEGVVVHNC

SEQ ID NO: 25 - protein, 138 aa, Artificial Sequence
  Synthetic
GSYALGPYQISAPQLPAYNGQTVGTFYYVNDAGGLESKVFSSGGPTPYPNYANAGHVEGQSALFMRDNGISEGLVFHNNPEGTCGFCVNMTETLLPENAKMTVVPPEGAIPVKRGATGETKVFTGNSNSPKSPTKGGC

SEQ ID NO: 26 - protein, 178 aa, Unknown
  Synthetic
  misc_feature (1)..(1): Xaa can be any naturally occurring amino acid
  misc_feature (105)..(105): Xaa can be any naturally occurring amino acid
  misc_feature (130)..(130): Xaa can be any naturally occurring amino acid
  misc_feature (141)..(141): Xaa can be any naturally occurring amino acid
XGSSHHHHHHSQDPIGLNGGANVYHYAPNPVGWVDPWGLAGSYALGPYQISAPQLPAYNGQTVGTFYYVNDAGGLESKVFSSGGPTPYPNYANAGHVEGQSALFXRDNGISEGLVFHNNPEGTCGFCVNXTETLLPENAKXTVVPPEGAIPVKRGATGETKVFTGNSNSPKSPTKGGC

SEQ ID NO: 27 - protein, 138 aa, Artificial Sequence
  Synthetic
GSYALGPYQISAPQLPAYNGQTVGTFYYVNDAGGLESKVFSSGGPTPYPNYANAGHVEGQSALFMRDNGISEGLVFHNNPEGTCGFCVNMIETLLPENAKMTVVPPEGAIPVKRGATGETKVFTGNSNSPKSPTKGGC

SEQ ID NO: 28 - protein, 138 aa, Artificial Sequence
  Synthetic
GSYALGPYQISAPQLPAYNGQTVGAFYYVNDAGGLESKVFSSGGPTPYPNYANAGHVEGQSALFMRDNGISEGLVFHNNPEGTCGFCVNMIETLLPENAKMTVVPPEGAIPVKRGATGETKVFTGNSNSPKSPTKGGC

SEQ ID NO: 29 - protein, 138 aa, Artificial Sequence
  Synthetic
GSYALGPYQISAPQLPAYNGRTVGTFYYVNDAGGLESKVFISGGPTPYPNYANAGHVEGQSALFMRDNGISEGLVFHNNPEGTCGFCVNMIETLLPENAKMTVVPPEGAIPVKRGATGETKVFTGNSNSPKSPTKGGC

SEQ ID NO: 30 - protein, 138 aa, Artificial Sequence
  Synthetic
GSYALGPYQISAPQLPAYNGQTVGTFYYVNDAGGLESKVFSSGGPTPYPNYANAGHVEGQSALFMRDNGISEGLVFHNNPEGTCGFCVNMIETLLPENAKMTVVPPEGAIPVKRGATGETKVFIGNSNSPKSPTKGGC

SEQ ID NO: 31 - protein, 138 aa, Artificial Sequence
  Synthetic
GSYALGPYQISAPQLPAYNGQTVGAFYYVNDAGGLESKVFSSGGPTPYPNYANAGHVEGQSALFMRDNGISEGLVFHNNPEGTCGFCVNMIETLLPENAKMTVVPPKGAIPVKRGATGETKVFTGNSNSPKSPTKGGC

SEQ ID NO: 32 - protein, 138 aa, Artificial Sequence
  Synthetic
GSYALGPYQISAPQLPAYNGRTVGTFYYVNDAGGLESKVFSSGGPTPYPNYANAGHVEGQSALFMRDNGISEGLVFHNNPEGTCGFCVNMTETLLPENAKMTVVPPEGAIPVKRGATGETKVFTGNSNSPKSPTKGGC

SEQ ID NO: 33 - protein, 138 aa, Artificial Sequence
  Synthetic
GSYALGPYQISAPQLPAYNGQTVGTFYYVNDAGGLESKVFISGGPTPYPNYANAGHVEGQSALFMRDNGISEGLVFHNNPEGTCGFCVNMTETLLPENAKMTVVPPEGAIPVKRGATGETKVFTGNSNSPKSPTKGGC

SEQ ID NO: 34 - protein, 138 aa, Artificial Sequence
  Synthetic
GSYALGPYQISAPQLPAYNGRTVGTFYYVNDAGGLESKVFISGGPTPYPNYANAGHVEGQSALFMRDNGISEGLVFHNNPEGTCGFCVNMTETLLPENAKMTVVPPEGAIPVKRGATGETKVFTGNSNSPKSPTKGGC

SEQ ID NO: 35 - protein, 138 aa, Artificial Sequence
  Synthetic
GSYALGPYQISAPQLPAYNGRTVGTFYYVNDAGGLESKVFSSGGPTPYPNYANAGHVEGQSALFMRDNGISEGLVFHNNPEGTCGFCVNMIETLLPENAKMTVVPPEGAIPVKRGATGETKVFTGNSNSPKSPTKGGC

SEQ ID NO: 36 - protein, 138 aa, Artificial Sequence
  Synthetic
GSYALGPYQISAPQLPAYNGQTVGTFYYVNDAGGLESKVFISGGPTPYPNYANAGHVEGQSALFMRDNGISEGLVFHNNPEGTCGFCVNMIETLLPENAKMTVVPPEGAIPVKRGATGETKVFTGNSNSPKSPTKGGC

SEQ ID NO: 37 - protein, 138 aa, Artificial Sequence
  Synthetic
GSYALGPYQISAPQLPAYNGQTVGTFYYVNDAGGLESKVFSSGGPTPYPNYANAGHVEGQSALFMRDNGISEGLVFHNNPEGTCGFCVNMIETLLPENAKMTVVPPKGAIPVKRGATGETKVFTGNSNSPKSPTKGGC

SEQ ID NO: 38 - protein, 138 aa, Artificial Sequence
  Synthetic
GSYALGPYQISAPQLPAYNGRTVGTFYYVNDAGGLESKVFISGGPTPYPNYANAGHVEGQSALFMRDNGISEGLVFHNNPEGTCGFCVNMIETLLPENAKMTVVPPKGAIPVKRGATGETKVFTGNSNSPKSPTKGGC

SEQ ID NO: 39 - protein, 138 aa, Artificial Sequence
  Synthetic
GSYALGPYQISAPQLPAYNGRTVGTFYYVNDAGGLESKVFSSGGPTPYPNYANAGHVEGQSALFMRDNGISEGLVFHNNPEGTCGFCVNMTETLLPENAKMTVVPPEGAIPVKRGATGETKVFIGNSNSPKSPTKGGC

SEQ ID NO: 40 - protein, 138 aa, Artificial Sequence
  Synthetic
GSYALGPYQISAPQLPAYNGQTVGTFYYVNDAGGLESKVFISGGPTPYPNYANAGHVEGQSALFMRDNGISEGLVFHNNPEGTCGFCVNMTETLLPENAKMTVVPPEGAIPVKRGATGETKVFIGNSNSPKSPTKGGC

SEQ ID NO: 41 - protein, 138 aa, Artificial Sequence
  Synthetic
GSYALGPYQISAPQLPAYNGRTVGTFYYVNDAGGLESKVFISGGPTPYPNYANAGHVEGQSALFMRDNGISEGLVFHNNPEGTCGFCVNMTETLLPENAKMTVVPPEGAIPVKRGATGETKVFIGNSNSPKSPTKGGC

SEQ ID NO: 42 - protein, 138 aa, Artificial Sequence
  Synthetic
GSYALGPYQISAPQLPAYNGRTVGTFYYVNDAGGLESKVFSSGGPTPYPNYANAGHVEGQSALFMRDNGISEGLVFHNNPEGTCGFCVNMIETLLPENAKMTVVPPEGAIPVKRGATGETKVFIGNSNSPKSPTKGGC

SEQ ID NO: 43 - protein, 138 aa, Artificial Sequence
  Synthetic
GSYALGPYQISAPQLPAYNGQTVGTFYYVNDAGGLESKVFISGGPTPYPNYANAGHVEGQSALFMRDNGISEGLVFHNNPEGTCGFCVNMIETLLPENAKMTVVPPEGAIPVKRGATGETKVFIGNSNSPKSPTKGGC

SEQ ID NO: 44 - protein, 138 aa, Artificial Sequence
  Synthetic
GSYALGPYQISAPQLPAYNGQTVGTFYYVNDAGGLESKVFSSGGPTPYPNYANAGHVEGQSALFMRDNGISEGLVFHNNPEGTCGFCVNMIETLLPENAKMTVVPPKGAIPVKRGATGETKVFIGNSNSPKSPTKGGC

SEQ ID NO: 45 - protein, 138 aa, Artificial Sequence
  Synthetic
GSYALGPYQISAPQLPAYNGRTVGTFYYVNDAGGLESKVFISGGPTPYPNYANAGHVEGQSALFMRDNGISEGLVFHNNPEGTCGFCVNMIETLLPENAKMTVVPPEGAIPVKRGATGETKVFIGNSNSPKSPTKGGC

SEQ ID NO: 46 - protein, 138 aa, Artificial Sequence
  Synthetic
GSYALGPYQISAPQLPAYNGRTVGTFYYVNDAGGLESKVFISGGPTPYPNYANAGHVEGQSALFMRDNGISEGLVFHNNPEGTCGFCVNMIETLLPENAKMTVVPPKGAIPVKRGATGETKVFIGNSNSPKSPTKGGC

SEQ ID NO: 47 - protein, 138 aa, Artificial Sequence
  Synthetic
GSYALGPYQISAPQLPAYNGQTVGAFYYVNDAGGLESKVFSSGGPTPYPNYANARHVEGQSALFMRDNGISEGLMFHNNPKGTCGFCVNMIETLLPENAKMTVVPPEGAIPVKRGATGETKVFIGNSNSPKSPTKGGC

SEQ ID NO: 48 - protein, 138 aa, Artificial Sequence
  Synthetic
GSYALGPYQISAPQLPAYNGQTVGTFYYVNDAGGLESKVFSSGGPTPYPNYASARHVEGQSALFMRDNGISEGLMFHNNPKGTCGFCVNMIETLLPENAKMTVVPPEGAIPVKRGATGETKVFIGNSNSPKSPTKGGC

SEQ ID NO: 49 - protein, 138 aa, Artificial Sequence
  Synthetic
GSYALGPYQISAPQLPAYNGQTVGTFYYVNDAGGLESKVFSSGGPTPYPNYTSAGHVEGQSALFMRDNGISEGLVFHNNPKGTCGFCVNMIETLLPENAKMTVVPPEGAIPVKRGATGKTKVFTGNSNSPKSPTKGGC

SEQ ID NO: 50 - protein, 138 aa, Artificial Sequence
  Synthetic
GSYALGPYQISAPQLPAYNGQTVGTFYYVNDAGGLESKVFSSGGPTPYPNYTSAGHVEGQSALFMRDNGISEGLVFHNNPKGTCGFCVNMIETLLPENAKMTVVPPEGAIPVKRGATGKTKVFIGNSNSPKSPTKGGC

SEQ ID NO: 51 - protein, 138 aa, Artificial Sequence
  Synthetic
GSYALGPYQISAPQLPAYNGQTVGTFYYVNDAGGLESKVFSSGGPTPYPNYTSAGHVEGQSALFMRDNGISEGLVFHNNPKGTCGFCVNMIETLLPENAKMTVVPPEGAIPVKRGATGGTKVFIGNSNSPKSPTKGGC

SEQ ID NO: 52 - protein, 138 aa, Artificial Sequence
  Synthetic
GSYALGPYQISAPQLPAYNGQTVGAFYYVNDAGGLESKVFSSGGPTPYPNYANASHVEGQSALFMRDNGISEGLVFHNNPKGTCGFCVNMIETLLPENAKMTVVPPEGTIPVKRGATGETKVFIGNSNSPKSPTKGGC

SEQ ID NO: 53 - protein, 138 aa, Artificial Sequence
  Synthetic
GSYALGPYQISAPQLPAYNGQTVGAFYYVNDAGGLESKVFSSGGPTPYPNYANASHVEGQSALFMRDNGISEGLVFHNNPKGTCGFCVNMIETLLPENAKMTVVPPKGTIPVKRGATGETKVFIGNSNSPKSPTKGGC

SEQ ID NO: 54 - protein, 138 aa, Artificial Sequence
  Synthetic
GSYALGPYQISAPQLPAYNGQTVGTFYYVNDAGGLESKVFISGGPTPYPNYVSAGHVEGQSALFMRDNGISEGLVFHNNPKGTCGFCVNMIETLLPENAKMTVVPPEGAIPVKRGATGETKVFIGNSNSPKSPTKGGC

SEQ ID NO: 55 - protein, 138 aa, Artificial Sequence
  Synthetic
GSYALGPYQISAPQLPAYNGQTVGTFYYVNDAGGLKSKVFISGGPTPYPNYVSAGHVEGQSALFMRDNGISEGLVFHNNPKGTCGFCVSMIETLLPENAKMTVVPPEGAIPVKRGATGETKVFIGNSNSPKSPTKGGC

SEQ ID NO: 56 - protein, 138 aa, Artificial Sequence
  Synthetic
GSYALGPYQISAPQLPAYNGQTVGTFYYVNDAGGLESKVFISGGPTPYPNYISAGHVEGQSALFMRDNGISEGLVFHNNPKGTCGFCVSMIETLLPENAKMTVVSPEGAIPVKRGATGETKVFIGNSNSPKSPTKGGC

SEQ ID NO: 57 - protein, 138 aa, Artificial Sequence
  Synthetic
GSYALGPYQISAPQLPAYNGQTVGTFYYVNDAGGLESKVFISGGSTPYPNYVSAGHVEGQSALFMRDNGISEGLVFHNNPKGTCGFCVSMIETLLPENAKMTVVPPEGAIPVKRGATGETKVFIGNSNSPKSPTKGGC

SEQ ID NO: 58 - protein, 138 aa, Artificial Sequence
  Synthetic
GSYALGPYQISAPQLPAYNGQTVGTFYYVNDAGGLESKVFISGGSTSYPNYVSAGHVEGQSALFMRDNGISEGLVFHNNPKGTCGFCVSMIETLLPENAKMTVVPPEGAIPVKRGATGETKVFIGNSNSPKSPTKGGC

SEQ ID NO: 59 - protein, 1368 aa, Unknown [sequence omitted]

SEQ ID NO: 60 - DNA, 4104 bp, Unknown
  Synthetic
atggataaaaaatatagcattggcctggatattggcaccaacagcgtgggctgggcggtgattaccgatgaatataaagtgccgagcaaaaaatttaaagtgctgggcaacaccgatcgccatagcattaaaaaaaacctgattggcgcgctgctgtttgatagcggcgaaaccgcggaagcgacccgcctgaaacgcaccgcgcgccgccgctatacccgccgcaaaaaccgcatttgctatctgcaggaaatttttagcaacgaaatggcgaaagtggatgatagcttttttcatcgcctggaagaaagctttctggtggaagaagataaaaaacatgaacgccatccgatttttggcaacattgtggatgaagtggcgtatcatgaaaaatatccgaccatttatcatctgcgcaaaaaactggtggatagcaccgataaagcggatctgcgcctgatttatctggcgctggcgcatatgattaaatttcgcggccattttctgattgaaggcgatctgaacccggataacagcgatgtggataaactgtttattcagctggtgcagacctataaccagctgtttgaagaaaacccgattaacgcgagcggcgtggatgcgaaagcgattctgagcgcgcgcctgagcaaaagccgccgcctggaaaacctgattgcgcagctgccgggcgaaaaaaaaaacggcctgtttggcaacctgattgcgctgagcctgggcctgaccccgaactttaaaagcaactttgatctggcggaagatgcgaaactgcagctgagcaaagatacctatgatgatgatctggataacctgctggcgcagattggcgatcagtatgcggatctgtttctggcggcgaaaaacctgagcgatgcgattctgctgagcgatattctgcgcgtgaacaccgaaattaccaaagcgccgctgagcgcgagcatgattaaacgctatgatgaacatcatcaggatctgaccctgctgaaagcgctggtgcgccagcagctgccggaaaaatataaagaaattttttttgatcagagcaaaaacggctatgcgggctatattgatggcggcgcgagccaggaagaattttataaatttattaaaccgattctggaaaaaatggatggcaccgaagaactgctggtgaaactgaaccgcgaagatctgctgcgcaaacagcgcacctttgataacggcagcattccgcatcagattcatctgggcgaactgcatgcgattctgcgccgccaggaagatttttatccgtttctgaaagataaccgcgaaaaaattgaaaaaattctgacctttcgcattccgtattatgtgggcccgctggcgcgcggcaacagccgctttgcgtggatgacccgcaaaagcgaagaaaccattaccccgtggaactttgaagaagtggtggataaaggcgcgagcgcgcagagctttattgaacgcatgaccaactttgataaaaacctgccgaacgaaaaagtgctgccgaaacatagcctgctgtatgaatattttaccgtgtataacgaactgaccaaagtgaaatatgtgaccgaaggcatgcgcaaaccggcgtttctgagcggcgaacagaaaaaagcgattgtggatctgctgtttaaaaccaaccgcaaagtgaccgtgaaacagctgaaagaagattattttaaaaaaattgaatgctttgatagcgtggaaattagcggcgtggaagatcgctttaacgcgagcctgggcacctatcatgatctgctgaaaattattaaagataaagattttctggataacgaagaaaacgaagatattctggaagatattgtgctgaccctgaccctgtttgaagatcgcgaaatgattgaagaacgcctgaaaacctatgcgcatctgtttgatgataaagtgatgaaacagctgaaacgccgccgctataccggctggggccgcctgagccgcaaactgattaacggcattcgcgataaacagagcggcaaaaccattctggattttctgaaaagcgatggctttgcgaaccgcaactttatgcagctgattcatgatgatagcctgacctttaaagaagatattcagaaagcgcaggtgagcggccagggcgatagcctgcatgaacatattgcgaacctggcgggcagcccggcgattaaaaaaggcattctgcagaccgtgaaagtggtggatgaactggtgaaagtgatgggccgccataaaccggaaaacattgtgattgaaatggcgcgcgaaaaccagaccacccagaaaggccagaaaaacagccgcgaacgcatgaaacgcattgaagaaggcattaaagaactgggcagccagattctgaaagaacatccggtggaaaacacccagctgcagaacgaaaaactgtatctgtattatctgcagaacggccgcgatatgtatgtggatcaggaactggatattaaccgcctgagcgattatgatgtggatcatattgtgccgcagagctttctgaaagatgatagcattgataacaaagtgctgacccgcagcgataaaaaccgcggcaaaagcgataacgtgccgagcgaagaagtggtgaaaaaaatgaaaaactattggcgccagctgctgaacgcgaaactgattacccagcgcaaatttgataacctgaccaaagcggaacgcggcggcctgagcgaactggataaagcgggctttattaaacgccagctggtggaaacccgccagattaccaaacatgtggcgcagattctggatagccgcatgaacaccaaatatgatgaaaacgataaactgattcgcgaagtgaaagtgattaccctgaaaagcaaactggtgagcgattttcgcaaagattttcagttttataaagtgcgcgaaattaacaactatcatcatgcgcatgatgcgtatctgaacgcggtggtgggcaccgcgctgattaaaaaatatccgaaactggaaagcgaatttgtgtatggcgattataaagtgtatgatgtgcgcaaaatgattgcgaaaagcgaacaggaaattggcaaagcgaccgcgaaatattttttttatagcaacattatgaacttttttaaaaccgaaattaccctggcgaacggcgaaattcgcaaacgcccgctgattgaaaccaacggcgaaaccggcgaaattgtgtgggataaaggccgcgattttgcgaccgtgcgcaaagtgctgagcatgccgcaggtgaacattgtgaaaaaaaccgaagtgcagaccggcggctttagcaaagaaagcattctgccgaaacgcaacagcgataaactgattgcgcgcaaaaaagattgggatccgaaaaaatatggcggctttgatagcccgaccgtggcgtatagcgtgctggtggtggcgaaagtggaaaaaggcaaaagcaaaaaactgaaaagcgtgaaagaactgctgggcattaccattatggaacgcagcagctttgaaaaaaacccgattgattttctggaagcgaaaggctataaagaagtgaaaaaagatctgattattaaactgccgaaatatagcctgtttgaactggaaaacggccgcaaacgcatgctggcgagcgcgggcgaactgcagaaaggcaacgaactggcgctgccgagcaaatatgtgaactttctgtatctggcgagccattatgaaaaactgaaaggcagcccggaagataacgaacagaaacagctgtttgtggaacagcataaacattatctggatgaaattattgaacagattagcgaatttagcaaacgcgtgattctggcggatgcgaacctggataaagtgctgagcgcgtataacaaacatcgcgataaaccgattcgcgaacaggcggaaaacattattcatctgtttaccctgaccaacctgggcgcgccggcggcgtttaaatattttgataccaccattgatcgcaaacgctataccagcaccaaagaagtgctggatgcgaccctgattcatcagagcattaccggcctgtatgaaacccgcattgatctgagccagctgggcggcgat

SEQ ID NO: 61 - DNA, 4104 bp, Unknown
  Synthetic
atggataagaaatactcaataggcttagatatcggcacaaatagcgtcggatgggcggtgatcactgatgattataaggttccgtctaaaaagttcaaggttctgggaaatacagaccgccacagtatcaaaaaaaatcttataggggctcttttatttggcagtggagagacagcggaagcgactcgtctcaaacggacagctcgtagaaggtatacacgtcggaagaatcgtatttgttatctacaggagattttttcaaatgagatggcgaaagtagatgatagtttctttcatcgacttgaagagtcttttttggtggaagaagacaagaagcatgaacgtcatcctatttttggaaatatagtagatgaagttgcttatcatgagaaatatccaactatctatcatctgcgaaaaaaattggcagattctactgataaagcggatttgcgcttaatctatttggccttagcgcatatgattaagtttcgtggtcattttttgattgagggagatttaaatcctgataatagtgatgtggacaaactatttatccagttggtacaaatctacaatcaattatttgaagaaaaccctattaacgcaagtagagtagatgctaaagcgattctttctgcacgattgagtaaatcaagacgattagaaaatctcattgctcagctccccggtgagaagagaaatggcttgtttgggaatctcattgctttgtcattgggattgacccctaattttaaatcaaattttgatttggcagaagatgctaaattacagctttcaaaagatacttacgatgatgatttagataatttattggcgcaaattggagatcaatatgctgatttgtttttggcagctaagaatttatcagatgctattttactttcagatatcctaagagtaaatagtgaaataactaaggctcccctatcagcttcaatgattaagcgctacgatgaacatcatcaagacttgactcttttaaaagctttagttcgacaacaacttccagaaaagtataaagaaatcttttttgatcaatcaaaaaacggatatgcaggttatattgatgggggagctagccaagaagaattttataaatttatcaaaccaattttagaaaaaatggatggtactgaggaattattggtgaaactaaatcgtgaagatttgctgcgcaagcaacggacctttgacaacggctctattccccatcaaattcacttgggtgagctgcatgctattttgagaagacaagaagacttttatccatttttaaaagacaatcgtgagaagattgaaaaaatcttgacttttcgaattccttattatgttggtccattggcgcgtggcaatagtcgttttgcatggatgactcggaagtctgaagaaacaattaccccatggaattttgaagaagttgtcgataaaggtgcttcagctcaatcatttattgaacgcatgacaaactttgataaaaatcttccaaatgaaaaagtactaccaaaacatagtttgctttatgagtattttacggtttataacgaattgacaaaggtcaaatatgttactgagggaatgcgaaaaccagcatttctttcaggtgaacagaagaaagccattgttgatttactcttcaaaacaaatcgaaaagtaaccgttaagcaattaaaagaagattatttcaaaaaaatagaatgttttgatagtgttgaaatttcaggagttgaagatagatttaatgcttcattaggcgcctaccatgatttgctaaaaattattaaagataaagattttttggataatgaagaaaatgaagatatcttagaggatattgttttaacattgaccttatttgaagatagggggatgattgaggaaagacttaaaacatatgctcacctctttgatgataaggtgatgaaacagcttaaacgtcgccgttatactggttggggacgtttgtctcgaaaattgattaatggtattagggataagcaatctggcaaaacaatattagattttttgaaatcagatggttttgccaatcgcaattttatgcagctgatccatgatgatagtttgacatttaaagaagatattcaaaaagcacaggtgtctggacaaggccatagtttacatgaacagattgctaacttagctggcagtcctgctattaaaaaaggtattttacagactgtaaaaattgttgatgaactggtcaaagtaatggggcataagccagaaaatatcgttattgaaatggcacgtgaaaatcagacaactcaaaagggccagaaaaattcgcgagagcgtatgaaacgaatcgaagaaggtatcaaagaattaggaagtcagattcttaaagagcatcctgttgaaaatactcaattgcaaaatgaaaagctctatctctattatctacaaaatggaagagacatgtatgtggaccaagaattagatattaatcgtttaagtgattatgatgtcgatcacattgttccacaaagtttcattaaagacgattcaatagacaataaggtactaacgcgttctgataaaaatcgtggtaaatcggataacgttccaagtgaagaagtagtcaaaaagatgaaaaactattggagacaacttctaaacgccaagttaatcactcaacgtaagtttgataatttaacgaaagctgaacgtggaggtttgagtgaacttgataaagctggttttatcaaacgccaattggttgaaactcgccaaatcactaagcatgtggcacaaattttggatagtcgcatgaatactaaatacgatgaaaatgataaacttattcgagaggttaaagtgattaccttaaaatctaaattagtttctgacttccgaaaagatttccaattctataaagtacgtgagattaacaattaccatcatgcccatgatgcgtatctaaatgccgtcgttggaactgctttgattaagaaatatccaaaacttgaatcggagtttgtctatggtgattataaagtttatgatgttcgtaaaatgattgctaagtctgagcaagaaataggcaaagcaaccgcaaaatatttcttttactctaatatcatgaacttcttcaaaacagaaattacacttgcaaatggagagattcgcaaacgccctctaatcgaaactaatggggaaactggagaaattgtctgggataaagggcgagattttgccacagtgcgcaaagtattgtccatgccccaagtcaatattgtcaagaaaacagaagtacagacaggcggattctccaaggagtcaattttaccaaaaagaaattcggacaagcttattgctcgtaaaaaagactgggatccaaaaaaatatggtggttttgatagtccaacggtagcttattcagtcctagtggttgctaaggtggaaaaagggaaatcgaagaagttaaaatccgttaaagagttactagggatcacaattatggaaagaagttcctttgaaaaaaatccgattgactttttagaagctaaaggatataaggaagttaaaaaagacttaatcattaaactacctaaatatagtctttttgagttagaaaacggtcgtaaacggatgctggctagtgccggagaattacaaaaaggaaatgagctggctctgccaagcaaatatgtgaattttttatatttagctagtcattatgaaaagttgaagggtagtccagaagataacgaacaaaaacaattgtttgtggagcagcataagcattatttagatgagattattgagcaaatcagtgaattttctaagcgtgttattttagcagatgccaatttagataaagttcttagtgcatataacaaacatagagacaaaccaatacgtgaacaagcagaaaatattattcatttatttacgttgacgaatcttggagctcccgctgcttttaaatattttgatacaacaattgatcgtaaacgatatacgtctacaaaagaagttttagatgccactcttatccatcaatccatcactggtctttatgaaacacgcattgatttgagtcagctaggaggtgactga

SEQ ID NO: 62 - protein, 1367 aa, Unknown
  Synthetic
MDKKYSIGLDIGTNSVGWAVITDDYKVPSKKFKVLGNTDRHSIKKNLIGALLFGSGETAEATRLKRTARRRYTRRKNRICYLQEIFSNEMAKVDDSFFHRLEESFLVEEDKKHERHPIFGNIVDEVAYHEKYPTIYHLRKKLADSTDKADLRLIYLALAHMIKFRGHFLIEGDLNPDNSDVDKLFIQLVQIYNQLFEENPINASRVDAKAILSARLSKSRRLENLIAQLPGEKRNGLFGNLIALSLGLTPNFKSNFDLAEDAKLQLSKDTYDDDLDNLLAQIGDQYADLFLAAKNLSDAILLSDILRVNSEITKAPLSASMIKRYDEHHQDLTLLKALVRQQLPEKYKEIFFDQSKNGYAGYIDGGASQEEFYKFIKPILEKMDGTEELLVKLNREDLLRKQRTFDNGSIPHQIHLGELHAILRRQEDFYPFLKDNREKIEKILTFRIPYYVGPLARGNSRFAWMTRKSEETITPWNFEEVVDKGASAQSFIERMTNFDKNLPNEKVLPKHSLLYEYFTVYNELTKVKYVTEGMRKPAFLSGEQKKAIVDLLFKTNRKVTVKQLKEDYFKKIECFDSVEISGVEDRFNASLGAYHDLLKIIKDKDFLDNEENEDILEDIVLTLTLFEDRGMIEERLKTYAHLFDDKVMKQLKRRRYTGWGRLSRKLINGIRDKQSGKTILDFLKSDGFANRNFMQLIHDDSLTFKEDIQKAQVSGQGHSLHEQIANLAGSPAIKKGILQTVKIVDELVKVMGHKPENIVIEMARENQTTQKGQKNSRERMKRIEEGIKELGSQILKEHPVENTQLQNEKLYLYYLQNGRDMYVDQELDINRLSDYDVDHIVPQSFIKDDSIDNKVLTRSDKNRGKSDNVPSEEVVKKMKNYWRQLLNAKLITQRKFDNLTKAERGGLSELDKAGFIKRQLVETRQITKHVAQILDSRMNTKYDENDKLIREVKVITLKSKLVSDFRKDFQFYKVREINNYHHAHDAYLNAVVGTALIKKYPKLESEFVYGDYKVYDVRKMIAKSEQEIGKATAKYFFYSNIMNFFKTEITLANGEIRKRPLIETNGETGEIVWDKGRDFATVRKVLSMPQVNIVKKTEVQTGGFSKESILPKRNSDKLIARKKDWDPKKYGGFDSPTVAYSVLVVAKVEKGKSKKLKSVKELLGITIMERSSFEKNPIDFLEAKGYKEVKKDLIIKLPKYSLFELENGRKRMLASAGELQKGNELALPSKYVNFLYLASHYEKLKGSPEDNEQKQLFVEQHKHYLDEIIEQISEFSKRVILADANLDKVLSAYNKHRDKPIREQAENIIHLFTLTNLGAPAAFKYFDTTIDRKRYTSTKEVLDATLIHQSITGLYETRIDLSQLGGD

SEQ ID NO: 63 - DNA, 4212 bp, Unknown
  Synthetic
atggataaaaagtattctattggtttagacatcggcactaattccgttggatgggctgtcataaccgatgaatacaaagtaccttcaaagaaatttaaggtgttggggaacacagaccgtcattcgattaaaaagaatcttatcggtgccctcctattcgatagtggcgaaacggcagaggcgactcgcctgaaacgaaccgctcggagaaggtatacacgtcgcaagaaccgaatatgttacttacaagaaatttttagcaatgagatggccaaagttgacgattctttctttcaccgtttggaagagtccttccttgtcgaagaggacaagaaacatgaacggcaccccatctttggaaacatagtagatgaggtggcatatcatgaaaagtacccaacgatttatcacctcagaaaaaagctagttgactcaactgataaagcggacctgaggttaatctacttggctcttgcccatatgataaagttccgtgggcactttctcattgagggtgatctaaatccggacaactcggatgtcgacaaactgttcatccagttagtacaaacctataatcagttgtttgaagagaaccctataaatgcaagtggcgtggatgcgaaggctattcttagcgcccgcctctctaaatcccgacggctagaaaacctgatcgcacaattacccggagagaagaaaaatgggttgttcggtaaccttatagcgctctcactaggcctgacaccaaattttaagtcgaacttcgacttagctgaagatgccaaattgcagcttagtaaggacacgtacgatgacgatctcgacaatctactggcacaaattggagatcagtatgcggacttatttttggctgccaaaaaccttagcgatgcaatcctcctatctgacatactgagagttaatactgagattaccaaggcgccgttatccgcttcaatgatcaaaaggtacgatgaacatcaccaagacttgacacttctcaaggccctagtccgtcagcaactgcctgagaaatataaggaaatattctttgatcagtcgaaaaacgggtacgcaggttatattgacggcggagcgagtcaagaggaattctacaagtttatcaaacccatattagagaagatggatgggacggaagagttgcttgtaaaactcaatcgcgaagatctactgcgaaagcagcggactttcgacaacggtagcattccacatcaaatccacttaggcgaattgcatgctatacttagaaggcaggaggatttttatccgttcctcaaagacaatcgtgaaaagattgagaaaatcctaacctttcgcataccttactatgtgggacccctggcccgagggaactctcggttcgcatggatgacaagaaagtccgaagaaacgattactccatggaattttgaggaagttgtcgataaaggtgcgtcagctcaatcgttcatcgagaggatgaccaactttgacaagaatttaccgaacgaaaaagtattgcctaagcacagtttactttacgagtatttcacagtgtacaatgaactcacgaaagttaagtatgtcactgagggcatgcgtaaacccgcctttctaagcggagaacagaagaaagcaatagtagatctgttattcaagaccaaccgcaaagtgacagttaagcaattgaaagaggactactttaagaaaattgaatgcttcgattctgtcgagatctccggggtagaagatcgatttaatgcgtcacttggtacgtatcatgacctcctaaagataattaaagataaggacttcctggataacgaagagaatgaagatatcttagaagatatagtgttgactcttaccctctttgaagatcgggaaatgattgaggaaagactaaaaacatacgctcacctgttcgacgataaggttatgaaacagttaaagaggcgtcgctatacgggctggggacgattgtcgcggaaacttatcaacgggataagagacaagcaaagtggtaaaactattctcgattttctaaagagcgacggcttcgccaataggaactttatgcagctgatccatgatgactctttaaccttcaaagaggatatacaaaaggcacaggtttccggacaaggggactcattgcacgaacatattgcgaatcttgctggttcgccagccatcaaaaagggcatactccagacagtcaaagtagtggatgagctagttaaggtcatgggacgtcacaaaccggaaaacattgtaatcgagatggcacgcgaaaatcaaacgactcagaaggggcaaaaaaacagtcgagagcggatgaagagaatagaagagggtattaaagaactgggcagccagatcttaaaggagcatcctgtggaaaatacccaattgcagaacgagaaactttacctctattacctacaaaatggaagggacatgtatgttgatcaggaactggacataaaccgtttatctgattacgacgtcgatcacattgtaccccaatcctttttgaaggacgattcaatcgacaataaagtgcttacacgctcggataagaaccgagggaaaagtgacaatgttccaagcgaggaagtcgtaaagaaaatgaagaactattggcggcagctcctaaatgcgaaactgataacgcaaagaaagttcgataacttaactaaagctgagaggggtggcttgtctgaacttgacaaggccggatttattaaacgtcagctcgtggaaacccgccaaatcacaaagcatgttgcacagatactagattcccgaatgaatacgaaatacgacgagaacgataagctgattcgggaagtcaaagtaatcactttaaagtcaaaattggtgtcggacttcagaaaggattttcaattctataaagttagggagataaataactaccaccatgcgcacgacgcttatcttaatgccgtcgtagggaccgcactcattaagaaatacccgaagctagaaagtgagtttgtgtatggtgattacaaagtttatgacgtccgtaagatgatcgcgaaaagcgaacaggagataggcaaggctacagccaaatacttcttttattctaacattatgaatttctttaagacggaaatcactctggcaaacggagagatacgcaaacgacctttaattgaaaccaatggggagacaggtgaaatcgtatgggataagggccgggacttcgcgacggtgagaaaagttttgtccatgccccaagtcaacatagtaaagaaaactgaggtgcagaccggagggttttcaaaggaatcgattcttccaaaaaggaatagtgataagctcatcgctcgtaaaaaggactgggacccgaaaaagtacggtggcttcgatagccctacagttgcctattctgtcctagtagtggcaaaagttgagaagggaaaatccaagaaactgaagtcagtcaaagaattattggggataacgattatggagcgctcgtcttttgaaaagaaccccatcgacttccttgaggcgaaaggttacaaggaagtaaaaaaggatctcataattaaactaccaaagtatagtctgtttgagttagaaaatggccgaaaacggatgttggctagcgccggagagcttcaaaaggggaacgaactcgcactaccgtctaaatacgtgaatttcctgtatttagcgtcccattacgagaagttgaaaggttcacctgaagataacgaacagaagcaactttttgttgagcagcacaaacattatctcgacgaaatcatagagcaaatttcggaattcagtaagagagtcatcctagctgatgccaatctggacaaagtattaagcgcatacaacaagcacagggataaacccatacgtgagcaggcggaaaatattatccatttgtttactcttaccaacctcggcgctccagccgcattcaagtattttgacacaacgatagatcgcaaacgatacacttctaccaaggaggtgctagacgcgacactgattcaccaatccatcacgggattatatgaaactcggatagatttgtcacagcttgggggtgacggatcccccaagaagaagaggaaagtctcgagcgactacaaagaccatgacggtgattataaagatcatgacatcgattacaaggatgacgatgacaaggctgcagga

SEQ ID NO: 64 - protein, 1404 aa, Unknown
  Synthetic
MDKKYSIGLDIGTNSVGWAVITDEYKVPSKKFKVLGNTDRHSIKKNLIGALLFDSGETAEATRLKRTARRRYTRRKNRICYLQEIFSNEMAKVDDSFFHRLEESFLVEEDKKHERHPIFGNIVDEVAYHEKYPTIYHLRKKLVDSTDKADLRLIYLALAHMIKFRGHFLIEGDLNPDNSDVDKLFIQLVQTYNQLFEENPINASGVDAKAILSARLSKSRRLENLIAQLPGEKKNGLFGNLIALSLGLTPNFKSNFDLAEDAKLQLSKDTYDDDLDNLLAQIGDQYADLFLAAKNLSDAILLSDILRVNTEITKAPLSASMIKRYDEHHQDLTLLKALVRQQLPEKYKEIFFDQSKNGYAGYIDGGASQEEFYKFIKPILEKMDGTEELLVKLNREDLLRKQRTFDNGSIPHQIHLGELHAILRRQEDFYPFLKDNREKIEKILTFRIPYYVGPLARGNSRFAWMTRKSEETITPWNFEEVVDKGASAQSFIERMTNFDKNLPNEKVLPKHSLLYEYFTVYNELTKVKYVTEGMRKPAFLSGEQKKAIVDLLFKTNRKVTVKQLKEDYFKKIECFDSVEISGVEDRFNASLGTYHDLLKIIKDKDFLDNEENEDILEDIVLTLTLFEDREMIEERLKTYAHLFDDKVMKQLKRRRYTGWGRLSRKLINGIRDKQSGKTILDFLKSDGFANRNFMQLIHDDSLTFKEDIQKAQVSGQGDSLHEHIANLAGSPAIKKGILQTVKVVDELVKVMGRHKPENIVIEMARENQTTQKGQKNSRERMKRIEEGIKELGSQILKEHPVENTQLQNEKLYLYYLQNGRDMYVDQELDINRLSDYDVDHIVPQSFLKDDSIDNKVLTRSDKNRGKSDNVPSEEVVKKMKNYWRQLLNAKLITQRKFDNLTKAERGGLSELDKAGFIKRQLVETRQITKHVAQILDSRMNTKYDENDKLIREVKVITLKSKLVSDFRKDFQFYKVREINNYHHAHDAYLNAVVGTALIKKYPKLESEFVYGDYKVYDVRKMIAKSEQEIGKATAKYFFYSNIMNFFKTEITLANGEIRKRPLIETNGETGEIVWDKGRDFATVRKVLSMPQVNIVKKTEVQTGGFSKESILPKRNSDKLIARKKDWDPKKYGGFDSPTVAYSVLVVAKVEKGKSKKLKSVKELLGITIMERSSFEKNPIDFLEAKGYKEVKKDLIIKLPKYSLFELENGRKRMLASAGELQKGNELALPSKYVNFLYLASHYEKLKGSPEDNEQKQLFVEQHKHYLDEIIEQISEFSKRVILADANLDKVLSAYNKHRDKPIREQAENIIHLFTLTNLGAPAAFKYFDTTIDRKRYTSTKEVLDATLIHQSITGLYETRIDLSQLGGDGSPKKKRKVSSDYKDHDGDYKDHDIDYKDDDDKAAG

SEQ ID NO: 65 - DNA, 4107 bp, Unknown
  Synthetic
atggataagaaatactcaataggcttagatatcggcacaaatagcgtcggatgggcggtgatcactgatgaatataaggttccgtctaaaaagttcaaggttctgggaaatacagaccgccacagtatcaaaaaaaatcttataggggctcttttatttgacagtggagagacagcggaagcgactcgtctcaaacggacagctcgtagaaggtatacacgtcggaagaatcgtatttgttatctacaggagattttttcaaatgagatggcgaaagtagatgatagtttctttcatcgacttgaagagtcttttttggtggaagaagacaagaagcatgaacgtcatcctatttttggaaatatagtagatgaagttgcttatcatgagaaatatccaactatctatcatctgcgaaaaaaattggtagattctactgataaagcggatttgcgcttaatctatttggccttagcgcatatgattaagtttcgtggtcattttttgattgagggagatttaaatcctgataatagtgatgtggacaaactatttatccagttggtacaaacctacaatcaattatttgaagaaaaccctattaacgcaagtggagtagatgctaaagcgattctttctgcacgattgagtaaatcaagacgattagaaaatctcattgctcagctccccggtgagaagaaaaatggcttatttgggaatctcattgctttgtcattgggtttgacccctaattttaaatcaaattttgatttggcagaagatgctaaattacagctttcaaaagatacttacgatgatgatttagataatttattggcgcaaattggagatcaatatgctgatttgtttttggcagctaagaatttatcagatgctattttactttcagatatcctaagagtaaatactgaaataactaaggctcccctatcagcttcaatgattaaacgctacgatgaacatcatcaagacttgactcttttaaaagctttagttcgacaacaacttccagaaaagtataaagaaatcttttttgatcaatcaaaaaacggatatgcaggttatattgatgggggagctagccaagaagaattttataaatttatcaaaccaattttagaaaaaatggatggtactgaggaattattggtgaaactaaatcgtgaagatttgctgcgcaagcaacggacctttgacaacggctctattccccatcaaattcacttgggtgagctgcatgctattttgagaagacaagaagacttttatccatttttaaaagacaatcgtgagaagattgaaaaaatcttgacttttcgaattccttattatgttggtccattggcgcgtggcaatagtcgttttgcatggatgactcggaagtctgaagaaacaattaccccatggaattttgaagaagttgtcgataaaggtgcttcagctcaatcatttattgaacgcatgacaaactttgataaaaatcttccaaatgaaaaagtactaccaaaacatagtttgctttatgagtattttacggtttataacgaattgacaaaggtcaaatatgttactgaaggaatgcgaaaaccagcatttctttcaggtgaacagaagaaagccattgttgatttactcttcaaaacaaatcgaaaagtaaccgttaagcaattaaaagaagattatttcaaaaaaatagaatgttttgatagtgttgaaatttcaggagttgaagatagatttaatgcttcattaggtacctaccatgatttgctaaaaattattaaagataaagattttttggataatgaagaaaatgaagatatcttagaggatattgttttaacattgaccttatttgaagatagggagatgattgaggaaagacttaaaacatatgctcacctctttgatgataaggtgatgaaacagcttaaacgtcgccgttatactggttggggacgtttgtctcgaaaattgattaatggtattagggataagcaatctggcaaaacaatattagattttttgaaatcagatggttttgccaatcgcaattttatgcagctgatccatgatgatagtttgacatttaaagaagacattcaaaaagcacaagtgtctggacaaggcgatagtttacatgaacatattgcaaatttagctggtagccctgctattaaaaaaggtattttacagactgtaaaagttgttgatgaattggtcaaagtaatggggcggcataagccagaaaatatcgttattgaaatggcacgtgaaaatcagacaactcaaaagggccagaaaaattcgcgagagcgtatgaaacgaatcgaagaaggtatcaaagaattaggaagtcagattcttaaagagcatcctgttgaaaatactcaattgcaaaatgaaaagctctatctctattatctccaaaatggaagagacatgtatgtggaccaagaattagatattaatcgtttaagtgattatgatgtcgatcacattgttccacaaagtttccttaaagacgattcaatagacaataaggtcttaacgcgttctgataaaaatcgtggtaaatcggataacgttccaagtgaagaagtagtcaaaaagatgaaaaactattggagacaacttctaaacgccaagttaatcactcaacgtaagtttgataatttaacgaaagctgaacgtggaggtttgagtgaacttgataaagctggttttatcaaacgccaattggttgaaactcgccaaatcactaagcatgtggcacaaattttggatagtcgcatgaatactaaatacgatgaaaatgataaacttattcgagaggttaaagtgattaccttaaaatctaaattagtttctgacttccgaaaagatttccaattctataaagtacgtgagattaacaattaccatcatgcccatgatgcgtatctaaatgccgtcgttggaactgctttgattaagaaatatccaaaacttgaatcggagtttgtctatggtgattataaagtttatgatgttcgtaaaatgattgctaagtctgagcaagaaataggcaaagcaaccgcaaaatatttcttttactctaatatcatgaacttcttcaaaacagaaattacacttgcaaatggagagattcgcaaacgccctctaatcgaaactaatggggaaactggagaaattgtctgggataaagggcgagattttgccacagtgcgcaaagtattgtccatgccccaagtcaatattgtcaagaaaacagaagtacagacaggcggattctccaaggagtcaattttaccaaaaagaaattcggacaagcttattgctcgtaaaaaagactgggatccaaaaaaatatggtggttttgatagtccaacggtagcttattcagtcctagtggttgctaaggtggaaaaagggaaatcgaagaagttaaaatccgttaaagagttactagggatcacaattatggaaagaagttcctttgaaaaaaatccgattgactttttagaagctaaaggatataaggaagttaaaaaagacttaatcattaaactacctaaatatagtctttttgagttagaaaacggtcgtaaacggatgctggctagtgccggagaattacaaaaaggaaatgagctggctctgccaagcaaatatgtgaattttttatatttagctagtcattatgaaaagttgaagggtagtccagaagataacgaacaaaaacaattgtttgtggagcagcataagcattatttagatgagattattgagcaaatcagtgaattttctaagcgtgttattttagcagatgccaatttagataaagttcttagtgcatataacaaacatagagacaaaccaatacgtgaacaagcagaaaatattattcatttatttacgttgacgaatcttggagctcccgctgcttttaaatattttgatacaacaattgatcgtaaacgatatacgtctacaaaagaagttttagatgccactcttatccatcaatccatcactggtctttatgaaacacgcattgatttgagtcagctaggaggtgactga

SEQ ID NO: 66 - protein, 1378 aa, Unknown
  Synthetic
MKEYHIGLDIGTSSIGWAVTDSQFKLMRIKGKTAIGVRLFEEGKTAAERRTFRTTRRRLKRRKWRLHYLDEIFAPHLQEVDENFLRRLKQSNIHPEDPTKNQAFIGKLLFPDLLKKNERGYPTLIKMRDELPVEQRAHYPVMNIYKLREAMINEDRQFDLREVYLAVHHIVKYRGHFLNNASVDKFKVGRIDFDKSFNVLNEAYEELQNGEGSFTIEPSKVEKIGQLLLDTKMRKLDRQKAVAKLLEVKVADKEETKRNKQIATAMSKLVLGYKADFATVAMANGNEWKIDLSSETSEDEIEKFREELSDAQNDILTEITSLFSQIMLNEIVPNGMSISESMMDRYWTHERQLAEVKEYLATQPASARKEFDQVYNKYIGQAPKERGFDLEKGLKKILSKKENWKEIDELLKAGDFLPKQRTSANGVIPHQMHQQELDRIIEKQAKYYPWLATENPATGERDRHQAKYELDQLVSFRIPYYVGPLVTPEVQKATSGAKFAWAKRKEDGEITPWNLWDKIDRAESAEAFIKRMTVKDTYLLNEDVLPANSLLYQKYNVLNELNNVRVNGRRLSVGIKQDIYTELFKKKKTVKASDVASLVMAKTRGVNKPSVEGLSDPKKFNSNLATYLDLKSIVGDKVDDNRYQTDLENIIEWRSVFEDGEIFADKLTEVEWLTDEQRSALVKKRYKGWGRLSKKLLTGIVDENGQRIIDLMWNTDQNFKEIVDQPVFKEQIDQLNQKAITNDGMTLRERVESVLDDAYTSPQNKKAIWQVVRVVEDIVKAVGNAPKSISIEFARNEGNKGEITRSRRTQLQKLFEDQAHELVKDTSLTEELEKAPDLSDRYYFYFTQGGKDMYTGDPINFDEISTKYDIDHILPQSFVKDNSLDNRVLTSRKENNKKSDQVPAKLYAAKMKPYWNQLLKQGLITQRKFENLTKDVDQNIKYRSLGFVKRQLVETRQVIKLTANILGSMYQEAGTEIIETRAGLTKQLREEFDLPKVREVNDYHHAVDAYLTTFAGQYLNRRYPKLRSFFVYGEYMKFKHGSDLKLRNFNFFHELMEGDKSQGKVVDQQTGELITTRDEVAKSFDRLLNMKYMLVSKEVHDRSDQLYGATIVTAKESGKLTSPIEIKKNRLVDLYGAYTNGTSAFMTIIKFTGNKPKYKVIGIPTTSAASLKRAGKPGSESYNQELHRIIKSNPKVKKGFEIVVPHVSYGQLIVDGDCKFTLASPTVQHPATQLVLSKKSLETISSGYKILKDKPAIANERLIRVFDEVVGQMNRYFTIFDQRSNRQKVADARDKFLSLPTESKYEGAKKVQVGKTEVITNLLMGLHANATQGDLKVLGLATFGFFQSTTGLSLSEDTMIVYQSPTGLFERRICLKDI

SEQ ID NO: 67 - protein, 1053 aa, Unknown
  Synthetic
MGKRNYILGLDIGITSVGYGIIDYETRDVIDAGVRLFKEANVENNEGRRSKRGARRLKRRRRHRIQRVKKLLFDYNLLTDHSELSGINPYEARVKGLSQKLSEEEFSAALLHLAKRRGVHNVNEVEEDTGNELSTKEQISRNSKALEEKYVAELQLERLKKDGEVRGSINRFKTSDYVKEAKQLLKVQKAYHQLDQSFIDTYIDLLETRRTYYEGPGEGSPFGWKDIKEWYEMLMGHCTYFPEELRSVKYAYNADLYNALNDLNNLVITRDENEKLEYYEKFQIIENVFKQKKKPTLKQIAKEILVNEEDIKGYRVTSTGKPEFTNLKVYHDIKDITARKEIIENAELLDQIAKILTIYQSSEDIQEELTNLNSELTQEEIEQISNLKGYTGTHNLSLKAINLILDELWHTNDNQIAIFNRLKLVPKKVDLSQQKEIPTTLVDDFILSPVVKRSFIQSIKVINAIIKKYGLPNDIIIELAREKNSKDAQKMINEMQKRNRQTNERIEEIIRTTGKENAKYLIEKIKLHDMQEGKCLYSLEAIPLEDLLNNPFNYEVDHIIPRSVSFDNSFNNKVLVKQEENSKKGNRTPFQYLSSSDSKISYETFKKHILNLAKGKGRISKTKKEYLLEERDINRFSVQKDFINRNLVDTRYATRGLMNLLRSYFRVNNLDVKVKSINGGFTSFLRRKWKFKKERNKGYKHHAEDALIIANADFIFKEWKKLDKAKKVMENQMFEEKQAESMPEIETEQEYKEIFITPHQIKHIKDFKDYKYSHRVDKKPNRKLINDTLYSTRKDDKGNTLIVNNLNGLYDKDNDKLKKLINKSPEKLLMYHHDPQTYQKLKLIMEQYGDEKNPLYKYYEETGNYLTKYSKKDNGPVIKKIKYYGNKLNAHLDITDDYPNSRNKVVKLSLKPYRFDVYLDNGVYKFVTVKNLDVIKKENYYEVNSKCYEEAKKLKKISNQAEFIASFYKNDLIKINGELYRVIGVNNDLLNRIEVNMIDITYREYLENMNDKRPPHIIKTIASKTQSIKKYSTDILGNLYEVKSKKHPQIIKK

SEQ ID NO: 68 - protein, 1409 aa, Unknown
  Synthetic
MLFNKCIIISINLDFSNKEKCMTKPYSIGLDIGTNSVGWAVITDNYKVPSKKMKVLGNTSKKYIKKNLLGVLLFDSGITAEGRRLKRTARRRYTRRRNRILYLQEIFSTEMATLDDAFFQRLDDSFLVPDDKRDSKYPIFGNLVEEKVYHDEFPTIYHLRKYLADSTKKADLRLVYLALAHMIKYRGHFLIEGEFNSKNNDIQKNFQDFLDTYNAIFESDLSLENSKQLEEIVKDKISKLEKKDRILKLFPGEKNSGIFSEFLKLIVGNQADFRKCFNLDEKASLHFSKESYDEDLETLLGYIGDDYSDVFLKAKKLYDAILLSGFLTVTDNETEAPLSSAMIKRYNEHKEDLALLKEYIRNISLKTYNEVFKDDTKNGYAGYIDGKTNQEDFYVYLKNLLAEFEGADYFLEKIDREDFLRKQRTFDNGSIPYQIHLQEMRAILDKQAKFYPFLAKNKERIEKILTFRIPYYVGPLARGNSDFAWSIRKRNEKITPWNFEDVIDKESSAEAFINRMTSFDLYLPEEKVLPKHSLLYETFNVYNELTKVRFIAESMRDYQFLDSKQKKDIVRLYFKDKRKVTDKDIIEYLHAIYGYDGIELKGIEKQFNSSLSTYHDLLNIINDKEFLDDSSNEAIIEEIIHTLTIFEDREMIKQRLSKFENIFDKSVLKKLSRRHYTGWGKLSAKLINGIRDEKSGNTILDYLIDDGISNRNFMQLIHDDALSFKKKIQKAQIIGDEDKGNIKEVVKSLPGSPAIKKGILQSIKIVDELVKVMGGRKPESIVVEMARENQYTNQGKSNSQQRLKRLEKSLKELGSKILKENIPAKLSKIDNNALQNDRLYLYYLQNGKDMYTGDDLDIDRLSNYDIDHIIPQAFLKDNSIDNKVLVSSASNRGKSDDFPSLEVVKKRKTFWYQLLKSKLISQRKFDNLTKAERGGLLPEDKAGFIQRQLVETRQITKHVARLLDEKFNNKKDENNRAVRTVKIITLKSTLVSQFRKDFELYKVREINDFHHAHDAYLNAVIASALLKKYPKLEPEFVYGDYPKYNSFRERKSATEKVYFYSNIMNIFKKSISLADGRVIERPLIEVNEETGESVWNKESDLATVRRVLSYPQVNVVKKVEEQNHGLDRGKPKGLFNANLSSKPKPNSNENLVGAKEYLDPKKYGGYAGISNSFAVLVKGTIEKGAKKKITNVLEFQGISILDRINYRKDKLNFLLEKGYKDIELIIELPKYSLFELSDGSRRMLASILSTNNKRGEIHKGNQIFLSQKFVKLLYHAKRISNTINENHRKYVENHKKEFEELFYYILEFNENYVGAKKNGKLLNSAFQSWQNHSIDELCSSFIGPTGSERKGLFELTSRGSAADFEFLGVKIPRYRDYTPSSLLKDATLIHQSVTGLYETRIDLAKLGEG

SEQ ID NO: 69 - protein, 1402 aa, Unknown
  Synthetic
MKIKNYNLALTPSTSAVGHVEVDDDLNILEPVHHQKAIGVAKFGEGETAEARRLARSARRTTKRRANRINHYFNEIMKPEIDKVDPLMFDRIKQAGLSPLDERKEFRTVIFDRPNIASYYHNQFPTIWHLQKYLMITDEKADIRLIYWALHSLLKHRGHFFNTTPMSQFKPGKLNLKDDMLALDDYNDLEGLSFAVANSPEIEKVIKDRSMHKKEKIAELKKLIVNDVPDKDLAKRNNKIITQIVNAIMGNSFHLNFIFDMDLDKLTSKAWSFKLDDPELDTKFDAISGSMTDNQIGIFETLQKIYSAISLLDILNGSSNVVDAKNALYDKHKRDLNLYFKFLNTLPDEIAKTLKAGYTLYIGNRKKDLLAARKLLKVNVAKNFSQDDFYKLINKELKSIDKQGLQTRFSEKVGELVAQNNFLPVQRSSDNVFIPYQLNAITFNKILENQGKYYDFLVKPNPAKKDRKNAPYELSQLMQFTIPYYVGPLVTPEEQVKSGIPKTSRFAWMVRKDNGAITPWNFYDKVDIEATADKFIKRSIAKDSYLLSELVLPKHSLLYEKYEVFNELSNVSLDGKKLSGGVKQILFNEVFKKTNKVNTSRILKALAKHNIPGSKITGLSNPEEFTSSLQTYNAWKKYFPNQIDNFAYQQDLEKMIEWSTVFEDHKILAKKLDEIEWLDDDQKKFVANTRLRGWGRLSKRLLTGLKDNYGKSIMQRLETTKANFQQIVYKPEFREQIDKISQAAAKNQSLEDILANSYTSPSNRKAIRKTMSVVDEYIKLNHGKEPDKIFLMFQRSEQEKGKQTEARSKQLNRILSQLKADKSANKLFSKQLADEFSNAIKKSKYKLNDKQYFYFQQLGRDALTGEVIDYDELYKYTVLHIIPRSKLTDDSQNNKVLTKYKIVDGSVALKFGNSYSDALGMPIKAFWTELNRLKLIPKGKLLNLTTDFSTLNKYQRDGYIARQLVETQQIVKLLATIMQSRFKHTKIIEVRNSQVANIRYQFDYFRIKNLNEYYRGFDAYLAAVVGTYLYKVYPKARRLFVYGQYLKPKKTNQENQDMHLDSEKKSQGFNFLWNLLYGKQDQIFVNGTDVIAFNRKDLITKMNTVYNYKSQKISLAIDYHNGAMFKATLFPRNDRDTAKTRKLIPKKKDYDTDIYGGYTSNVDGYMLLAEIIKRDGNKQYGFYGVPSRLVSELDTLKKTRYTEYEEKLKEIIKPELGVDLKKIKKIKILKNKVPFNQVIIDKGSKFFITSTSYRWNYRQLILSAESQQTLMDLVVDPDFSNHKARKDARKNADERLIKVYEEILYQVKNYMPMFVELHRCYEKLVDAQKTFKSLKISDKAMVLNQILILLHSNATSPVLEKLGYHTRFTLGKKHNLISENAVLVTQSITGLKENHVSIKQML

SEQ ID NO: 70 - protein, 1385 aa, Unknown
  Synthetic
MTNEKYSIGLDIGTSSIGFAVVNDNNRVIRVKGKNAIGVRLFDEGKAAADRRSFRTTRRSFRTTRRRLSRRRWRLKLLREIFDAYITPVDEAFFIRLKESNLSPKDSKKQYSGDILFNDRSDKDFYEKYPTIYHLRNALMTEHRKFDVREIYLAIHHIMKFRGHFLNATPANNFKVGRLNLEEKFEELNDIYQRVFPDESIEFRTDNLEQIKEVLLDNKRSRADRQRTLVSDIYQSSEDKDIEKRNKAVATEILKASLGNKAKLNVITNVEVDKEAAKEWSITFDSESIDDDLAKIEGQMTDDGHEIIEVLRSLYSGITLSAIVPENHTLSQSMVAKYDLHKDHLKLFKKLINGMTDTKKAKNLRAAYDGYIDGVKGKVLPQEDFYKQVQVNLDDSAEANEIQTYIDQDIFMPKQRTKANGSIPHQLQQQELDQIIENQKAYYPWLAELNPNPDKKRQQLAKYKLDELVTFRVPYYVGPMITAKDQKNQSGAEFAWMIRKEPGNITPWNFDQKVDRMATANQFIKRMTTTDTYLLGEDVLPAQSLLYQKFEVLNELNKIRIDHKPISIEQKQQIFNDLFKQFKNVTIKHLQDYLVSQGQYSKRPLIEGLADEKRFNSSLSTYSDLCGIFGAKLVEENDRQEDLEKIIEWSTIFEDKKIYRAKLNDLTWLTDDQKEKLATKRYQGWGRLSRKLLVGLKNSEHRNIMDILWITNENFMQIQAEPDFAKLVTDANKGMLEKTDSQDVINDLYTSPQNKKAIRQILLVVHDIQNAMHGQAPAKIHVEFARGEERNPRRSVQRQRQVEAAYEKVSNELVSAKVRQEFKEAINNKRDFKDRLFLYFMQGGIDIYTGKQLNIDQLSSYQIDHILPQAFVKDDSLTNRVLTNENQVKADSVPIDIFGKKMLSVWGRMKDQGLISKGKYRNLTMNPENISAHTENGFINRQLVETRQVIKLAVNILADEYGDSTQIISVKADLSHQMREDFELLKNRDVNDYHHAFDAYLAAFIGNYLLKRYPKLESYFVYGDFKKFTQKETKMRRFNFIYDLKHCDQVVNKETGEILWTKDEDIKYIRHLFAYKKILVSHEVREKRGALYNQTIYKAKDDKGSGQESKKLIRIKDDKETKIYGGYSGKSLAYMTIVQITKKNKVSYRVIGIPTLALARLNKLENDSTENNGELYKIIKPQFTHYKVDKKNGEIIETTDDFKIVVSKVRFQQLIDDAGQFFMLASDTYKNNAQQLVISNNALKAINNTNITDCPRDDLERLDNLRLDSAFDEIVKKMDKYFSAYDANNFREKIRNSNLIFYQLPVEDQWENNKITELGKRTVLTRILQGLHANATTTDMSIFKIKTPFGQLRQRSGISLSENAQLIYQSPTGLFERRVQLNKIK

SEQ ID NO: 71 - protein, 1367 aa, Unknown
  Synthetic
MKKQKFSDYYLGFDIGTNSVGWCVTDLDYNVLRFNKKDMWGSRLFEEAKTAAERRVQRNSRRRLKRRKWRLNLLEEIFSNEILKIDSNFFRRLKESSLWLEDKSSKEKFTLFNDDNYKDYDFYKQYPTIFHLRNELIKNPEKKDIRLVYLAIHSIFKSRGHFLFEGQNLKEIKNFETLYNNLIAFLEDNGINKIIDKNNIEKLEKIVCDSKKGLKDKEKEFKEIFNSDKQLVAIFKLSVGSSVSLNDLFDTDEYKKGEVEKEKISFREQIYEDDKPIYYSILGEKIELLDIAKTFYDFMVLNNILADSQYISEAKVKLYEEHKKDLKNLKYIIRKYNKGNYDKLFKDKNENNYSAYIGLNKEKSKKEVIEKSRLKIDDLIKNIKGYLPKVEEIEEKDKAIFNKILNKIELKTILPKQRISDNGTLPYQIHEAELEKILENQSKYYDFLNYEENGIITKDKLLMTFKFRIPYYVGPLNSYHKDKGGNSWIVRKEEGKILPWNFEQKVDIEKSAEEFIKRMTNKCTYLNGEDVIPKDTFLYSEYVILNELNKVQVNDEFLNEENKRKIIDELFKENKKVSEKKFKEYLLVKQIVDGTIELKGVKDSFNSNYISYIRFKDIFGEKLNLDIYKEISEKSILWKCLYGDDKKIFEKKIKNEYGDILTKDEIKKINTFKFNNWGRLSEKLLTGIEFINLETGECYSSVMDALRRTNYNLMELLSSKFTLQESINNENKEMNEASYRDLIEESYVSPSLKRAIFQTLKIYEEIRKITGRVPKKVFIEMARGGDESMKNKKIPARQEQLKKLYDSCGNDIANFSIDIKEMKNSLISYDNNSLRQKKLYLYYLQFGKCMYTGREIDLDRLLQNNDTYDIDHIYPRSKVIKDDSFDNLVLVLKNENAEKSNEYPVKKEIQEKMKSFWRFLKEKNFISDEKYKRLTGKDDFELRGFMARQLVNVRQTTKEVGKILQQIEPEIKIVYSKAEIASSFREMFDFIKVRELNDTHHAKDAYLNIVAGNVYNTKFTEKPYRYLQEIKENYDVKKIYNYDIKNAWDKENSLEIVKKNMEKNTVNITRFIKEKKGQLFDLNPIKKGETSNEIISIKPKVYNGKDDKLNEKYGYYKSLNPAYFLYVEHKEKNKRIKSFERVNLVDVNNIKDEKSLVKYLIENKKLVEPRVIKKVYKRQVILINDYPYSIVTLDSNKLMDFENLKPLFLENKYEKILKNVIKFLEDNQGKSEENYKFIYLKKKDRYEKNETLESVKDRYNLEFNEMYDKFLEKLDSKDYKNYMNNKKYQELLDVKEKFIKLNLFDKAFTLKSFLDLFNRKTMADFSKVGLTKYLGKIQKISSNVLSKNELYLLEESVTGLFVKKIKL

SEQ ID NO: 72 - protein, 1346 aa, Unknown
  Synthetic
MNKYYLGLDMGSASVGWAVTDENYHLVRRKGKDLWGVRTFDVAQTAKERRITRGNRRRQDRRKQRIQILQELLGEEVLKTDPGFFHRMKESRYVVEDKRTLDGKQVELPYALFVDKDYTDKEYYKQFPTINHLIVYLMTTSDTPDIRLVYLALHYYMKNRGNFLHSGDINNVKDINDILEQLDNVLETFLDGWNLKLKSYVEDIKNIYNRDLGRGERKKAFVNTLGAKTKAEKAFCSLISGGSTNLAELFDDSSLKEIETPKIEFASSSLEDKIDGIQEALEDRFAVIEAAKRLYDWKTLTDILGDSSSLAEARVNSYQMHHEQLLELKSLVKEYLDRKVFQEVFVSLNVANNYPAYIGHTKINGKKKELEVKRTKRNDFYSYVKKQVIEPIKKKVSDEAVLTKLSEIESLIEVDKYLPLQVNSDNGVIPYQVKLNELTRIFDNLENRIPVLRENRDKIIKTFKFRIPYYVGSLNGVVKNGKCTNWMVRKEEGKIYPWNFEDKVDLEASAEQFIRRMTNKCTYLVNEDVLPKYSLLYSKYLVLSELNNLRIDGRPLDVKIKQDIYENVFKKNRKVTLKKIKKYLLKEGIITDDDALSGLADDVKSSLTAYRDFKEKLGHLDLSEAQMENIILNITLFGDDKKLLKKRLAALYPFIDDKSLNRIATLNYRDWGRLSERFLSGITSVDQETGELRTIIQCMYETQANLMQLLAEPYHFVEAIEKENPKVDLESISYRIVNDLYVSPAVKRQIWQTLLVIKDIKQVMKHDPERIFIEMAREKQESKKTKSRKQVLSEVYKKAKEYEHLFEKLNSLTEEQLRSKKIYLYFTQLGKCMYSGEPIDFENLVSANSNYDIDHIYPQSKTIDDSFNNIVLVKKSLNAYKSNHYPIDKNIRDNEKVKTLWNTLVSKGLITKEKYERLIRSTPFSDEELAGFIARQLVETRQSTKAVAEILSNWFPESEIVYSKAKNVSNFRQDFEILKVRELNDCHHAHDAYLNIVVGNAYHTKFTNSPYRFIKNKANQEYNLRKLLQKVNKIESNGVVAWVGQSENNPGTIATVKKVIRRNTVLISRMVKEVDGQLFDLTLMKKGKGQVPIKSSDERLTDISKYGGYNKATGAYFTFVKSKKRGKVVRSFEYVPLHLSKQFENNNELLKEYIEKDRGLTDVEILIPKVLINSLFRYNGSLVRITGRGDTRLLLVHEQPLYVSNSFVQQLKSVSSYKLKKSENDNAKLTKTATEKLSNIDELYDGLLRKLDLPIYSYWFSSIKEYLVESRTKYIKLSIEEKALVIFEILHLFQSDAQVPNLKILGLSTKPSRIRIQKNLKDTDKMSIIHQSPSGIFEHEIELTSL

SEQ ID NO: 73 - protein, 1312 aa, Unknown
  Synthetic
MQNGFLGITVSSEQVGWAVTNPKYELERASRKDLWGVRLFDKAETAEDRRMFRTNRRLNQRKKNRIHYLRDIFHEEVNQKDPNFFQQLDESNFCEDDRTVEFNFDTNLYKNQFPTVYHLRKYLMETKDKPDIRLVYLAFSKFMKNRGHFLYKGNLGEVMDFENSMKGFCESLEKFNIDFPTLSDEQVKEVRDILCDHKIAKTVKKKNIITITKVKSKTAKAWIGLFCGCSVPVKVLFQDIDEEIVTDPEKISFEDASYDDYIANIEKGVGIYYEAIVSAKMLFDWSILNEILGDHQLLSDAMIAEYNKHHDDLKRLQKIIKGTGSRELYQDIFINDVSGNYVCYVGHAKTMSSADQKQFYTFLKNRLKNVNGISSEDAEWIDTEIKNGTLLPKQTKRDNSVIPHQLQLREFELILDNMQEMYPFLKENREKLLKIFNFVIPYYVGPLKGVVRKGESTNWMVPKKDGVIHPWNFDEMVDKEASAECFISRMTGNCSYLFNEKVLPKNSLLYETFEVLNELNPLKINGEPISVELKQRIYEQLFLTGKKVTKKSLTKYLIKNGYDKDIELSGIDNEFHSNLKSHIDFEDYDNLSDEEVEQIILRITVFEDKQLLKDYLNREFVKLSEDERKQICSLSYKGWGNLSEMLLNGITVTDSNGVEVSVMDMLWNTNLNLMQILSKKYGYKAEIEHYNKEHEKTIYNREDLMDYLNIPPAQRRKVNQLITIVKSLKKTYGVPNKIFFKISREHQDDPKRTSSRKEQLKYLYKSLKSEDEKHLMKELDELNDHELSNDKVYLYFLQKGRCIYSGKKLNLSRLRKSNYQNDIDYIYPLSAVNDRSMNNKVLTGIQENRADKYTYFPVDSEIQKKMKGFWMELVLQGFMTKEKYFRLSRENDFSKSELVSFIEREISDNQQSGRMIASVLQYYFPESKIVFVKEKLISSFKRDFHLISSYGHNHLQAAKDAYITIVVGNVYHTKFTMDPAIYFKNHKRKDYDLNRLFLENISRDGQIAWESGPYGSIQTVRKEYAQNHIAVTKRVVEVKGGLFKQMPLKKGHGEYPLKTNDPRFGNIAQYGGYTNVTGSYFVLVESMEKGKKRISLEYVPVYLHERLEDDPGHKLLKEYLVDHRKLNHPKILLAKVRKNSLLKIDGFYYRLNGRSGNALILTNAVELIMDDWQTKTANKISGYMKRRAIDKKARVYQNEFHIQELEQLYDFYLDKLKNGVYKNRKNNQAELIHNEKEQFMELKTEDQCVLLTEIKKLFVCSPMQADLTLIGGSKHTGMIAMSSNVTKADFAVIAEDPLGLRNKVIYSHKGEK

SEQ ID NO: 74 - protein, 1344 aa, Unknown
  Synthetic
MSQNNNKIYNIGLDIGDASVGWAVVDEHYNLLKRHGKHMWGSRLFTQANTAVERRSSRSTRRRYNKRRERIRLLREIMEDMVLDVDPTFFIRLANVSFLDQEDKKDYLKENYHSNYNLFIDKDFNDKTYYDKYPTIYHLRKHLCESKEKEDPRLIYLALHHIVKYRGNFLYEGQKFSMDVSNIEDKMIDVLRQFNEINLFEYVEDRKKIDEVLNVLKEPLSKKHKAEKAFALFDTTKDNKAAYKELCAALAGNKFNVTKMLKEAELHDEDEKDISFKFSDATFDDAFVEKQPLLGDCVEFIDLLHDIYSWVELQNILGSAHTSEPSISAAMIQRYEDHKNDLKLLKDVIRKYLPKKYFEVFRDEKSKKNNYCNYINHPSKTPVDEFYKYIKKLIEKIDDPDVKTILNKIELESFMLKQNSRTNGAVPYQMQLDELNKILENQSVYYSDLKDNEDKIRSILTFRIPYYFGPLNITKDRQFDWIIKKEGKENERILPWNANEIVDVDKTADEFIKRMRNFCTYFPDEPVMAKNSLTVSKYEVLNEINKLRINDHLIKRDMKDKMLHTLFMDHKSISANAMKKWLVKNQYFSNTDDIKIEGFQKENACSTSLTPWIDFTKIFGKINESNYDFIEKIIYDVTVFEDKKILRRRLKKEYDLDEEKIKKILKLKYSGWSRLSKKLLSGIKTKYKDSTRTPETVLEVMERTNMNLMQVINDEKLGFKKTIDDANSTSVSGKFSYAEVQELAGSPAIKRGIWQALLIVDEIKKIMKHEPAHVYIEFARNEDEKERKDSFVNQMLKLYKDYDFEDETEKEANKHLKGEDAKSKIRSERLKLYYTQMGKCMYTGKSLDIDRLDTYQVDHIVPQSLLKDDSIDNKVLVLSSENQRKLDDLVIPSSIRNKMYGFWEKLFNNKIISPKKFYSLIKTEFNEKDQERFINRQIVETRQITKHVAQIIDNHYENTKVVTVRADLSHQFRERYHIYKNRDINDFHHAHDAYIATILGTYIGHRFESLDAKYIYGEYKRIFRNQKNKGKEMKKNNDGFILNSMRNIYADKDTGEIVWDPNYIDRIKKCFYYKDCFVTKKLEENNGTFFNVTVLPNDTNSDKDNTLATVPVNKYRSNVNKYGGFSGVNSFIVAIKGKKKKGKKVIEVNKLTGIPLMYKNADEEIKINYLKQAEDLEEVQIGKEILKNQLIEKDGGLYYIVAPTEIINAKQLILNESQTKLVCEIYKAMKYKNYDNLDSEKIIDLYRLLINKMELYYPEYRKQLVKKFEDRYEQLKVISIEEKCNIIKQILATLHCNSSIGKIMYSDFKISTTIGRLNGRTISLDDISFIAESPTGMYSKKYKL

SEQ ID NO: 75 - protein, 1288 aa, Unknown
  Synthetic
MRLFEEGHTAEDRRLKRTARRRISRRRNRLRYLQAFFEEAMTDLDENFFARLQESFLVPEDKKWHRHPIFAKLEDEVAYHETYPTIYHLRKKLADSSEQADLRLIYLALAHIVKYRGHFLIEGKLSTENTSVKDQFQQFMVIYNQTFVNGESRLVSAPLPESVLIEEELTEKASRTKKSEKVLQQFPQEKANGLFGQFLKLMVGNKADFKKVFGLEEEAKITYASESYEEDLEGILAKVGDEYSDVFLAAKNVYDAVELSTILADSDKKSHAKLSSSMIVRFTEHQEDLKKFKRFIRENCPDEYDNLFKNEQKDGYAGYIAHAGKVSQLKFYQYVKKIIQDIAGAEYFLEKIAQENFLRKQRTFDNGVIPHQIHLAELQAIIHRQAAYYPFLKENQEKIEQLVTFRIPYYVGPLSKGDASTFAWLKRQSEEPIRPWNLQETVDLDQSATAFIERMTNFDTYLPSEKVLPKHSLLYEKFMVFNELTKISYTDDRGIKANFSGKEKEKIFDYLFKTRRKVKKKDIIQFYRNEYNTEIVTLSGLEEDQFNASFSTYQDLLKCGLTRAELDHPDNAEKLEDIIKILTIFEDRQRIRTQLSTFKGQFSAEVLKKLERKHYTGWGRLSKKLINGIYDKESGKTILDYLVKDDGVSKHYNRNFMQLINDSQLSFKNAIQKAQSSEHEETLSETVNELAGSPAIKKGIYQSLKIVDELVAIMGYAPKRIVVEMARENQTTSTGKRRSIQRLKIVEKAMAEIGSNLLKEQPTTNEQLRDTRLFLYYMQNGKDMYTGDELSLHRLSHYDIDHIIPQSFMKDDSLDNLVLVGSTENRGKSDDVPSKEVVKDMKAYWEKLYAAGLISQRKFQRLTKGEQGGLTLEDKAHFIQRQLVETRQITKNVAGILDQRYNAKSKEKKVQIITLKASLTSQFRSIFGLYKVREVNDYHHGQDAYLNCVVATTLLKVYPNLAPEFVYGEYPKFQTFKENKATAKAIIYTNLLRFFTEDEPRFTKDGEILWSNSYLKTIKKELNYHQMNIVKKVEVQKGGFSKESIKPKGPSNKLIPVKNGLDPQKYGGFDSPVVAYTVLFTHEKGKKPLIKQEILGITIMEKTRFEQNPILFLEEKGFLRPRVLMKLPKYTLYEFPEGRRRLLASAKEAQKGNQMVLPEHLLTLLYHAKQCLLPNQSESLAYVEQHQPEFQEILERVVDFAEVHTLAKSKVQQIVKLFEANQTADVKEIAASFIQLMQFNAMGAPSTFKFFQKDIERARYTSIKEIFDATIIYQSPTGLYETRRKVVD

SEQ ID NO: 76 - protein, 1052 aa, Unknown
  Synthetic
KRNYILGLDIGITSVGYGIIDYETRDVIDAGVRLFKEANVENNEGRRSKRGARRLKRRRRHRIQRVKKLLFDYNLLTDHSELSGINPYEARVKGLSQKLSEEEFSAALLHLAKRRGVHNVNEVEEDTGNELSTKEQISRNSKALEEKYVAELQLERLKKDGEVRGSINRFKTSDYVKEAKQLLKVQKAYHQLDQSFIDTYIDLLETRRTYYEGPGEGSPFGWKDIKEWYEMLMGHCTYFPEELRSVKYAYNADLYNALNDLNNLVITRDENEKLEYYEKFQIIENVFKQKKKPTLKQIAKEILVNEEDIKGYRVTSTGKPEFTNLKVYHDIKDITARKEIIENAELLDQIAKILTIYQSSEDIQEELTNLNSELTQEEIEQISNLKGYTGTHNLSLKAINLILDELWHTNDNQIAIFNRLKLVPKKVDLSQQKEIPTTLVDDFILSPVVKRSFIQSIKVINAIIKKYGLPNDIIIELAREKNSKDAQKMINEMQKRNRQTNERIEEIIRTTGKENAKYLIEKIKLHDMQEGKCLYSLEAIPLEDLLNNPFNYEVDHIIPRSVSFDNSFNNKVLVKQEENSKKGNRTPFQYLSSSDSKISYETFKKHILNLAKGKGRISKTKKEYLLEERDINRFSVQKDFINRNLVDTRYATRGLMNLLRSYFRVNNLDVKVKSINGGFTSFLRRKWKFKKERNKGYKHHAEDALIIANADFIFKEWKKLDKAKKVMENQMFEEKQAESMPEIETEQEYKEIFITPHQIKHIKDFKDYKYSHRVDKKPNRELINDTLYSTRKDDKGNTLIVNNLNGLYDKDNDKLKKLINKSPEKLLMYHHDPQTYQKLKLIMEQYGDEKNPLYKYYEETGNYLTKYSKKDNGPVIKKIKYYGNKLNAHLDITDDYPNSRNKVVKLSLKPYRFDVYLDNGVYKFVTVKNLDVIKKENYYEVNSKCYEEAKKLKKISNQAEFIASFYNNDLIKINGELYRVIGVNNDLLNRIEVNMIDITYREYLENMNDKRPPRIIKTIASKTQSIKKYSTDILGNLYEVKSKKHPQIIKKG

SEQ ID NO: 77 - protein, 1082 aa, Unknown
  Synthetic
MKYKIGLDIGITSIGWAVINLDIPRIEDLGVRIFDRAENPKTGESLALPRRLARSARRRLRRRKHRLERIRRLFVREGILTKEELNKLFEKKHEIDVWQLRVEALDRKLNNDELARILLHLAKRRGFRSNRKSERTNKENSTMLKHIEENQSILSSYRTVAEMVVKDPKFSLHKRNKEDNYTNTVARDDLEREIKLIFAKQREYGNIVCTEAFEHEYISIWASQRPFASKDDIEKKVGFCTFEPKEKRAPKATYTFQSFTVWEHINKLRLVSPGGIRALTDDERRLIYKQAFHKNKITFHDVRTLLNLPDDTRFKGLLYDRNTTLKENEKVRFLELGAYHKIRKAIDSVYGKGAAKSFRPIDFDTFGYALTMFKDDTDIRSYLRNEYEQNGKRMENLADKVYDEELIEELLNLSFSKFGHLSLKALRNILPYMEQGEVYSTACERAGYTFTGPKKKQKTVLLPNIPPIANPVVMRALTQARKVVNAIIKKYGSPVSIHIELARELSQSFDERRKMQKEQEGNRKKNETAIRQLVEYGLTLNPTGLDIVKFKLWSEQNGKCAYSLQPIEIERLLEPGYTEVDHVIPYSRSLDDSYTNKVLVLTKENREKGNRTPAEYLGLGSERWQQFETFVLTNKQFSKKKRDRLLRLHYDENEENEFKNRNLNDTRYISRFLANFIREHLKFADSDDKQKVYTVNGRITAHLRSRWNFNKNREESNLHHAVDAAIVACTTPSDIARVTAFYQRREQNKELSKKTDPQFPQPWPHFADELQARLSKNPKESIKALNLGNYDNEKLESLQPVFVSRMPKRSITGAAHQETLRRYIGIDERSGKIQTVVKKKLSEIQLDKTGHFPMYGKESDPRTYEAIRQRLLEHNNDPKKAFQEPLYKPKKNGELGPIIRTIKIIDTTNQVIPLNDGKTVAYNSNIVRVDVFEKDGKYYCVPIYTIDMMKGILPNKAIEPNKPYSEWKEMTEDYTFRFSLYPNDLIRIEFPREKTIKTAVGEEIKIKDLFAYYQTIDSSNGGLSLVSHDNNFSLRSIGSRTLKRFEKYQVDVLGNIYKVRGEKRVGVASSSHSKAGETIRPL

SEQ ID NO: 78 - protein, 1375 aa, Unknown
  Synthetic
MEKKYSIGLDIGTNSVGWAVITDDYKVPSKKFKVLGNTNRKSIKKNLMGALLFDSGETAEATRLKRTARRRYTRRKNRIRYLQEIFANEMAKLDDSFFQRLEESFLVEEDKKNERHPIFGNLADEVAYHRNYPTIYHLRKKLADSPEKADLRLIYLALAHIIKFRGHFLIEGKLNAENSDVAKLFYQLIQTYNQLFEESPLDEIEVDAKGILSARLSKSKRLEKLIAVFPNEKKNGLFGNIIALALGLTPNFKSNFDLTEDAKLQLSKDTYDDDLDELLGQIGDQYADLFSAAKNLSDAILLSDILRSNSEVTKAPLSASMVKRYDEHHQDLALLKTLVRQQFPEKYAEIFKDDTKNGYAGYVGIGIKHRKRTTKLATQEEFYKFIKPILEKMDGAEELLAKLNRDDLLRKQRTFDNGSIPHQIHLKELHAILRRQEEFYPFLKENREKIEKILTFRIPYYVGPLARGNSRFAWLTRKSEEAITPWNFEEVVDKGASAQSFIERMTNFDEQLPNKKVLPKHSLLYEYFTVYNELTKVKYVTERMRKPEFLSGEQKKAIVDLLFKTNRKVTVKQLKEDYFKKIECFDSVEIIGVEDRFNASLGTYHDLLKIIKDKDFLDNEENEDILEDIVLTLTLFEDREMIEERLKTYAHLFDDKVMKQLKRRHYTGWGRLSRKMINGIRDKQSGKTILDFLKSDGFSNRNFMQLIHDDSLTFKEEIEKAQVSGQGDSLHEQIADLAGSPAIKKGILQTVKIVDELVKVMGHKPENIVIEMARENQTTTKGLQQSRERKKRIEEGIKELESQILKENPVENTQLQNEKLYLYYLQNGRDMYVDQELDINRLSDYDVDHIVPQSFIKDDSIDNKVLTRSVENRGKSDNVPSEEVVKKMKNYWRQLLNAKLITQRKFDNLTKAERGGLSEADKAGFIKRQLVETRQITKHVARILDSRMNTKRDKNDKPIREVKVITLKSKLVSDFRKDFQLYKVRDINNYHHAHDAYLNAVVGTALIKKYPKLESEFVYGDYKVYDVRKMIAKSEQEIGKATAKRFFYSNIMNFFKTEVKLANGEIRKRPLIETNGETGEVVWNKEKDFATVRKVLAMPQVNIVKKTEVQTGGFSKESILSKRESAKLIPRKKGWDTRKYGGFGSPTVAYSILVVAKVEKGKAKKLKSVKVLVGITIMEKGSYEKDPIGFLEAKGYKDIKKELIFKLPKYSLFELENGRRRMLASATELQKANELVLPQHLVRLLYYTQNISATTGSNNLGYIEQHREEFKEIFEKIIDFSEKYILKNKVNSNLKSSFDEQFAVSDSILLSNSFVSLLKYTSFGASGGFTFLDLDVKQGRLRYQTVTEVLDATLIYQSITGLYETRTDLSQLGGD

SEQ ID NO: 79 - protein, 1368 aa, Unknown
  Synthetic
  misc_feature (10)..(10): Xaa can be any naturally occurring amino acid
  misc_feature (840)..(840): Xaa can be any naturally occurring amino acid
MDKKYSIGLXIGTNSVGWAVITDEYKVPSKKFKVLGNTDRHSIKKNLIGALLFDSGETAEATRLKRTARRRYTRRKNRICYLQEIFSNEMAKVDDSFFHRLEESFLVEEDKKHERHPIFGNIVDEVAYHEKYPTIYHLRKKLVDSTDKADLRLIYLALAHMIKFRGHFLIEGDLNPDNSDVDKLFIQLVQTYNQLFEENPINASGVDAKAILSARLSKSRRLENLIAQLPGEKKNGLFGNLIALSLGLTPNFKSNFDLAEDAKLQLSKDTYDDDLDNLLAQIGDQYADLFLAAKNLSDAILLSDILRVNTEITKAPLSASMIKRYDEHHQDLTLLKALVRQQLPEKYKEIFFDQSKNGYAGYIDGGASQEEFYKFIKPILEKMDGTEELLVKLNREDLLRKQRTFDNGSIPHQIHLGELHAILRRQEDFYPFLKDNREKIEKILTFRIPYYVGPLARGNSRFAWMTRKSEETITPWNFEEVVDKGASAQSFIERMTNFDKNLPNEKVLPKHSLLYEYFTVYNELTKVKYVTEGMRKPAFLSGEQKKAIVDLLFKTNRKVTVKQLKEDYFKKIECFDSVEISGVEDRFNASLGTYHDLLKIIKDKDFLDNEENEDILEDIVLTLTLFEDREMIEERLKTYAHLFDDKVMKQLKRRRYTGWGRLSRKLINGIRDKQSGKTILDFLKSDGFANRNFMQLIHDDSLTFKEDIQKAQVSGQGDSLHEHIANLAGSPAIKKGILQTVKVVDELVKVMGRHKPENIVIEMARENQTTQKGQKNSRERMKRIEEGIKELGSQILKEHPVENTQLQNEKLYLYYLQNGRDMYVDQELDINRLSDYDVDXIVPQSFLKDDSIDNKVLTRSDKNRGKSDNVPSEEVVKKMKNYWRQLLNAKLITQRKFDNLTKAERGGLSELDKAGFIKRQLVETRQITKHVAQILDSRMNTKYDENDKLIREVKVITLKSKLVSDFRKDFQFYKVREINNYHHAHDAYLNAVVGTALIKKYPKLESEFVYGDYKVYDVRKMIAKSEQEIGKATAKYFFYSNIMNFFKTEITLANGEIRKRPLIETNGETGEIVWDKGRDFATVRKVLSMPQVNIVKKTEVQTGGFSKESILPKRNSDKLIARKKDWDPKKYGGFDSPTVAYSVLVVAKVEKGKSKKLKSVKELLGITIMERSSFEKNPIDFLEAKGYKEVKKDLIIKLPKYSLFELENGRKRMLASAGELQKGNELALPSKYVNFLYLASHYEKLKGSPEDNEQKQLFVEQHKHYLDEIIEQISEFSKRVILADANLDKVLSAYNKHRDKPIREQAENIIHLFTLTNLGAPAAFKYFDTTIDRKRYTSTKEVLDATLIHQSITGLYETRIDLSQLGGD

SEQ ID NO: 80 - protein, 1368 aa, Unknown
  Synthetic
MDKKYSIGLAIGTNSVGWAVITDEYKVPSKKFKVLGNTDRHSIKKNLIGALLFDSGETAEATRLKRTARRRYTRRKNRICYLQEIFSNEMAKVDDSFFHRLEESFLVEEDKKHERHPIFGNIVDEVAYHEKYPTIYHLRKKLVDSTDKADLRLIYLALAHMIKFRGHFLIEGDLNPDNSDVDKLFIQLVQTYNQLFEENPINASGVDAKAILSARLSKSRRLENLIAQLPGEKKNGLFGNLIALSLGLTPNFKSNFDLAEDAKLQLSKDTYDDDLDNLLAQIGDQYADLFLAAKNLSDAILLSDILRVNTEITKAPLSASMIKRYDEHHQDLTLLKALVRQQLPEKYKEIFFDQSKNGYAGYIDGGASQEEFYKFIKPILEKMDGTEELLVKLNREDLLRKQRTFDNGSIPHQIHLGELHAILRRQEDFYPFLKDNREKIEKILTFRIPYYVGPLARGNSRFAWMTRKSEETITPWNFEEVVDKGASAQSFIERMTNFDKNLPNEKVLPKHSLLYEYFTVYNELTKVKYVTEGMRKPAFLSGEQKKAIVDLLFKTNRKVTVKQLKEDYFKKIECFDSVEISGVEDRFNASLGTYHDLLKIIKDKDFLDNEENEDILEDIVLTLTLFEDREMIEERLKTYAHLFDDKVMKQLKRRRYTGWGRLSRKLINGIRDKQSGKTILDFLKSDGFANRNFMQLIHDDSLTFKEDIQKAQVSGQGDSLHEHIANLAGSPAIKKGILQTVKVVDELVKVMGRHKPENIVIEMARENQTTQKGQKNSRERMKRIEEGIKELGSQILKEHPVENTQLQNEKLYLYYLQNGRDMYVDQELDINRLSDYDVDAIVPQSFLKDDSIDNKVLTRSDKNRGKSDNVPSEEVVKKMKNYWRQLLNAKLITQRKFDNLTKAERGGLSELDKAGFIKRQLVETRQITKHVAQILDSRMNTKYDENDKLIREVKVITLKSKLVSDFRKDFQFYKVREINNYHHAHDAYLNAVVGTALIKKYPKLESEFVYGDYKVYDVRKMIAKSEQEIGKATAKYFFYSNIMNFFKTEITLANGEIRKRPLIETNGETGEIVWDKGRDFATVRKVLSMPQVNIVKKTEVQTGGFSKESILPKRNSDKLIARKKDWDPKKYGGFDSPTVAYSVLVVAKVEKGKSKKLKSVKELLGITIMERSSFEKNPIDFLEAKGYKEVKKDLIIKLPKYSLFELENGRKRMLASAGELQKGNELALPSKYVNFLYLASHYEKLKGSPEDNEQKQLFVEQHKHYLDEIIEQISEFSKRVILADANLDKVLSAYNKHRDKPIREQAENIIHLFTLTNLGAPAAFKYFDTTIDRKRYTSTKEVLDATLIHQSITGLYETRIDLSQLGGD

SEQ ID NO: 81 - protein, 1368 aa, Unknown
  Synthetic
  misc_feature (10)..(10): Xaa can be any naturally occurring amino acid
MDKKYSIGLXIGTNSVGWAVITDEYKVPSKKFKVLGNTDRHSIKKNLIGALLFDSGETAEATRLKRTARRRYTRRKNRICYLQEIFSNEMAKVDDSFFHRLEESFLVEEDKKHERHPIFGNIVDEVAYHEKYPTIYHLRKKLVDSTDKADLRLIYLALAHMIKFRGHFLIEGDLNPDNSDVDKLFIQLVQTYNQLFEENPINASGVDAKAILSARLSKSRRLENLIAQLPGEKKNGLFGNLIALSLGLTPNFKSNFDLAEDAKLQLSKDTYDDDLDNLLAQIGDQYADLFLAAKNLSDAILLSDILRVNTEITKAPLSASMIKRYDEHHQDLTLLKALVRQQLPEKYKEIFFDQSKNGYAGYIDGGASQEEFYKFIKPILEKMDGTEELLVKLNREDLLRKQRTFDNGSIPHQIHLGELHAILRRQEDFYPFLKDNREKIEKILTFRIPYYVGPLARGNSRFAWMTRKSEETITPWNFEEVVDKGASAQSFIERMTNFDKNLPNEKVLPKHSLLYEYFTVYNELTKVKYVTEGMRKPAFLSGEQKKAIVDLLFKTNRKVTVKQLKEDYFKKIECFDSVEISGVEDRFNASLGTYHDLLKIIKDKDFLDNEENEDILEDIVLTLTLFEDREMIEERLKTYAHLFDDKVMKQLKRRRYTGWGRLSRKLINGIRDKQSGKTILDFLKSDGFANRNFMQLIHDDSLTFKEDIQKAQVSGQGDSLHEHIANLAGSPAIKKGILQTVKVVDELVKVMGRHKPENIVIEMARENQTTQKGQKNSRERMKRIEEGIKELGSQILKEHPVENTQLQNEKLYLYYLQNGRDMYVDQELDINRLSDYDVDHIVPQSFLKDDSIDNKVLTRSDKNRGKSDNVPSEEVVKKMKNYWRQLLNAKLITQRKFDNLTKAERGGLSELDKAGFIKRQLVETRQITKHVAQILDSRMNTKYDENDKLIREVKVITLKSKLVSDFRKDFQFYKVREINNYHHAHDAYLNAVVGTALIKKYPKLESEFVYGDYKVYDVRKMIAKSEQEIGKATAKYFFYSNIMNFFKTEITLANGEIRKRPLIETNGETGEIVWDKGRDFATVRKVLSMPQVNIVKKTEVQTGGFSKESILPKRNSDKLIARKKDWDPKKYGGFDSPTVAYSVLVVAKVEKGKSKKLKSVKELLGITIMERSSFEKNPIDFLEAKGYKEVKKDLIIKLPKYSLFELENGRKRMLASAGELQKGNELALPSKYVNFLYLASHYEKLKGSPEDNEQKQLFVEQHKHYLDEIIEQISEFSKRVILADANLDKVLSAYNKHRDKPIREQAENIIHLFTLTNLGAPAAFKYFDTTIDRKRYTSTKEVLDATLIHQSITGLYETRIDLSQLGGD

SEQ ID NO: 82 - protein, 1368 aa, Unknown
  Synthetic
  misc_feature (762)..(762): Xaa can be any naturally occurring amino acid
MDKKYSIGLDIGTNSVGWAVITDEYKVPSKKFKVLGNTDRHSIKKNLIGALLFDSGETAEATRLKRTARRRYTRRKNRICYLQEIFSNEMAKVDDSFFHRLEESFLVEEDKKHERHPIFGNIVDEVAYHEKYPTIYHLRKKLVDSTDKADLRLIYLALAHMIKFRGHFLIEGDLNPDNSDVDKLFIQLVQTYNQLFEENPINASGVDAKAILSARLSKSRRLENLIAQLPGEKKNGLFGNLIALSLGLTPNFKSNFDLAEDAKLQLSKDTYDDDLDNLLAQIGDQYADLFLAAKNLSDAILLSDILRVNTEITKAPLSASMIKRYDEHHQDLTLLKALVRQQLPEKYKEIFFDQSKNGYAGYIDGGASQEEFYKFIKPILEKMDGTEELLVKLNREDLLRKQRTFDNGSIPHQIHLGELHAILRRQEDFYPFLKDNREKIEKILTFRIPYYVGPLARGNSRFAWMTRKSEETITPWNFEEVVDKGASAQSFIERMTNFDKNLPNEKVLPKHSLLYEYFTVYNELTKVKYVTEGMRKPAFLSGEQKKAIVDLLFKTNRKVTVKQLKEDYFKKIECFDSVEISGVEDRFNASLGTYHDLLKIIKDKDFLDNEENEDILEDIVLTLTLFEDREMIEERLKTYAHLFDDKVMKQLKRRRYTGWGRLSRKLINGIRDKQSGKTILDFLKSDGFANRNFMQLIHDDSLTFKEDIQKAQVSGQGDSLHEHIANLAGSPAIKKGILQTVKVVDELVKVMGRHKPENIVIXMARENQTTQKGQKNSRERMKRIEEGIKELGSQILKEHPVENTQLQNEKLYLYYLQNGRDMYVDQELDINRLSDYDVDHIVPQSFLKDDSIDNKVLTRSDKNRGKSDNVPSEEVVKKMKNYWRQLLNAKLITQRKFDNLTKAERGGLSELDKAGFIKRQLVETRQITKHVAQILDSRMNTKYDENDKLIREVKVITLKSKLVSDFRKDFQFYKVREINNYHHAHDAYLNAVVGTALIKKYPKLESEFVYGDYKVYDVRKMIAKSEQEIGKATAKYFFYSNIMNFFKTEITLANGEIRKRPLIETNGETGEIVWDKGRDFATVRKVLSMPQVNIVKKTEVQTGGFSKESILPKRNSDKLIARKKDWDPKKYGGFDSPTVAYSVLVVAKVEKGKSKKLKSVKELLGITIMERSSFEKNPIDFLEAKGYKEVKKDLIIKLPKYSLFELENGRKRMLASAGELQKGNELALPSKYVNFLYLASHYEKLKGSPEDNEQKQLFVEQHKHYLDEIIEQISEFSKRVILADANLDKVLSAYNKHRDKPIREQAENIIHLFTLTNLGAPAAFKYFDTTIDRKRYTSTKEVLDATLIHQSITGLYETRIDLSQLGGD

SEQ ID NO: 83 - protein, 1368 aa, Unknown
  Synthetic
  misc_feature (983)..(983): Xaa can be any naturally occurring amino acid
MDKKYSIGLDIGTNSVGWAVITDEYKVPSKKFKVLGNTDRHSIKKNLIGALLFDSGETAEATRLKRTARRRYTRRKNRICYLQEIFSNEMAKVDDSFFHRLEESFLVEEDKKHERHPIFGNIVDEVAYHEKYPTIYHLRKKLVDSTDKADLRLIYLALAHMIKFRGHFLIEGDLNPDNSDVDKLFIQLVQTYNQLFEENPINASGVDAKAILSARLSKSRRLENLIAQLPGEKKNGLFGNLIALSLGLTPNFKSNFDLAEDAKLQLSKDTYDDDLDNLLAQIGDQYADLFLAAKNLSDAILLSDILRVNTEITKAPLSASMIKRYDEHHQDLTLLKALVRQQLPEKYKEIFFDQSKNGYAGYIDGGASQEEFYKFIKPILEKMDGTEELLVKLNREDLLRKQRTFDNGSIPHQIHLGELHAILRRQEDFYPFLKDNREKIEKILTFRIPYYVGPLARGNSRFAWMTRKSEETITPWNFEEVVDKGASAQSFIERMTNFDKNLPNEKVLPKHSLLYEYFTVYNELTKVKYVTEGMRKPAFLSGEQKKAIVDLLFKTNRKVTVKQLKEDYFKKIECFDSVEISGVEDRFNASLGTYHDLLKIIKDKDFLDNEENEDILEDIVLTLTLFEDREMIEERLKTYAHLFDDKVMKQLKRRRYTGWGRLSRKLINGIRDKQSGKTILDFLKSDGFANRNFMQLIHDDSLTFKEDIQKAQVSGQGDSLHEHIANLAGSPAIKKGILQTVKVVDELVKVMGRHKPENIVIEMARENQTTQKGQKNSRERMKRIEEGIKELGSQILKEHPVENTQLQNEKLYLYYLQNGRDMYVDQELDINRLSDYDVDHIVPQSFLKDDSIDNKVLTRSDKNRGKSDNVPSEEVVKKMKNYWRQLLNAKLITQRKFDNLTKAERGGLSELDKAGFIKRQLVETRQITKHVAQILDSRMNTKYDENDKLIREVKVITLKSKLVSDFRKDFQFYKVREINNYHXAHDAYLNAVVGTALIKKYPKLESEFVYGDYKVYDVRKMIAKSEQEIGKATAKYFFYSNIMNFFKTEITLANGEIRKRPLIETNGETGEIVWDKGRDFATVRKVLSMPQVNIVKKTEVQTGGFSKESILPKRNSDKLIARKKDWDPKKYGGFDSPTVAYSVLVVAKVEKGKSKKLKSVKELLGITIMERSSFEKNPIDFLEAKGYKEVKKDLIIKLPKYSLFELENGRKRMLASAGELQKGNELALPSKYVNFLYLASHYEKLKGSPEDNEQKQLFVEQHKHYLDEIIEQISEFSKRVILADANLDKVLSAYNKHRDKPIREQAENIIHLFTLTNLGAPAAFKYFDTTIDRKRYTSTKEVLDATLIHQSITGLYETRIDLSQLGGD

SEQ ID NO: 84 - protein, 1368 aa, Unknown
  Synthetic
  misc_feature (986)..(986): Xaa can be any naturally occurring amino acid
MDKKYSIGLDIGTNSVGWAVITDEYKVPSKKFKVLGNTDRHSIKKNLIGALLFDSGETAEATRLKRTARRRYTRRKNRICYLQEIFSNEMAKVDDSFFHRLEESFLVEEDKKHERHPIFGNIVDEVAYHEKYPTIYHLRKKLVDSTDKADLRLIYLALAHMIKFRGHFLIEGDLNPDNSDVDKLFIQLVQTYNQLFEENPINASGVDAKAILSARLSKSRRLENLIAQLPGEKKNGLFGNLIALSLGLTPNFKSNFDLAEDAKLQLSKDTYDDDLDNLLAQIGDQYADLFLAAKNLSDAILLSDILRVNTEITKAPLSASMIKRYDEHHQDLTLLKALVRQQLPEKYKEIFFDQSKNGYAGYIDGGASQEEFYKFIKPILEKMDGTEELLVKLNREDLLRKQRTFDNGSIPHQIHLGELHAILRRQEDFYPFLKDNREKIEKILTFRIPYYVGPLARGNSRFAWMTRKSEETITPWNFEEVVDKGASAQSFIERMTNFDKNLPNEKVLPKHSLLYEYFTVYNELTKVKYVTEGMRKPAFLSGEQKKAIVDLLFKTNRKVTVKQLKEDYFKKIECFDSVEISGVEDRFNASLGTYHDLLKIIKDKDFLDNEENEDILEDIVLTLTLFEDREMIEERLKTYAHLFDDKVMKQLKRRRYTGWGRLSRKLINGIRDKQSGKTILDFLKSDGFANRNFMQLIHDDSLTFKEDIQKAQVSGQGDSLHEHIANLAGSPAIKKGILQTVKVVDELVKVMGRHKPENIVIEMARENQTTQKGQKNSRERMKRIEEGIKELGSQILKEHPVENTQLQNEKLYLYYLQNGRDMYVDQELDINRLSDYDVDHIVPQSFLKDDSIDNKVLTRSDKNRGKSDNVPSEEVVKKMKNYWRQLLNAKLITQRKFDNLTKAERGGLSELDKAGFIKRQLVETRQITKHVAQILDSRMNTKYDENDKLIREVKVITLKSKLVSDFRKDFQFYKVREINNYHHAHXAYLNAVVGTALIKKYPKLESEFVYGDYKVYDVRKMIAKSEQEIGKATAKYFFYSNIMNFFKTEITLANGEIRKRPLIETNGETGEIVWDKGRDFATVRKVLSMPQVNIVKKTEVQTGGFSKESILPKRNSDKLIARKKDWDPKKYGGFDSPTVAYSVLVVAKVEKGKSKKLKSVKELLGITIMERSSFEKNPIDFLEAKGYKEVKKDLIIKLPKYSLFELENGRKRMLASAGELQKGNELALPSKYVNFLYLASHYEKLKGSPEDNEQKQLFVEQHKHYLDEIIEQISEFSKRVILADANLDKVLSAYNKHRDKPIREQAENIIHLFTLTNLGAPAAFKYFDTTIDRKRYTSTKEVLDATLIHQSITGLYETRIDLSQLGGD

SEQ ID NO: 85 - protein, 1368 aa, Unknown
  Synthetic
MDKKYSIGLAIGTNSVGWAVITDEYKVPSKKFKVLGNTDRHSIKKNLIGALLFDSGETAEATRLKRTARRRYTRRKNRICYLQEIFSNEMAKVDDSFFHRLEESFLVEEDKKHERHPIFGNIVDEVAYHEKYPTIYHLRKKLVDSTDKADLRLIYLALAHMIKFRGHFLIEGDLNPDNSDVDKLFIQLVQTYNQLFEENPINASGVDAKAILSARLSKSRRLENLIAQLPGEKKNGLFGNLIALSLGLTPNFKSNFDLAEDAKLQLSKDTYDDDLDNLLAQIGDQYADLFLAAKNLSDAILLSDILRVNTEITKAPLSASMIKRYDEHHQDLTLLKALVRQQLPEKYKEIFFDQSKNGYAGYIDGGASQEEFYKFIKPILEKMDGTEELLVKLNREDLLRKQRTFDNGSIPHQIHLGELHAILRRQEDFYPFLKDNREKIEKILTFRIPYYVGPLARGNSRFAWMTRKSEETITPWNFEEVVDKGASAQSFIERMTNFDKNLPNEKVLPKHSLLYEYFTVYNELTKVKYVTEGMRKPAFLSGEQKKAIVDLLFKTNRKVTVKQLKEDYFKKIECFDSVEISGVEDRFNASLGTYHDLLKIIKDKDFLDNEENEDILEDIVLTLTLFEDREMIEERLKTYAHLFDDKVMKQLKRRRYTGWGRLSRKLINGIRDKQSGKTILDFLKSDGFANRNFMQLIHDDSLTFKEDIQKAQVSGQGDSLHEHIANLAGSPAIKKGILQTVKVVDELVKVMGRHKPENIVIEMARENQTTQKGQKNSRERMKRIEEGIKELGSQILKEHPVENTQLQNEKLYLYYLQNGRDMYVDQELDINRLSDYDVDHIVPQSFLKDDSIDNKVLTRSDKNRGKSDNVPSEEVVKKMKNYWRQLLNAKLITQRKFDNLTKAERGGLSELDKAGFIKRQLVETRQITKHVAQILDSRMNTKYDENDKLIREVKVITLKSKLVSDFRKDFQFYKVREINNYHHAHDAYLNAVVGTALIKKYPKLESEFVYGDYKVYDVRKMIAKSEQEIGKATAKYFFYSNIMNFFKTEITLANGEIRKRPLIETNGETGEIVWDKGRDFATVRKVLSMPQVNIVKKTEVQTGGFSKESILPKRNSDKLIARKKDWDPKKYGGFDSPTVAYSVLVVAKVEKGKSKKLKSVKELLGITIMERSSFEKNPIDFLEAKGYKEVKKDLIIKLPKYSLFELENGRKRMLASAGELQKGNELALPSKYVNFLYLASHYEKLKGSPEDNEQKQLFVEQHKHYLDEIIEQISEFSKRVILADANLDKVLSAYNKHRDKPIREQAENIIHLFTLTNLGAPAAFKYFDTTIDRKRYTSTKEVLDATLIHQSITGLYETRIDLSQLGGD

SEQ ID NO: 86 - protein, 1368 aa, Unknown
  Synthetic
MDKKYSIGLDIGTNSVGWAVITDEYKVPSKKFKVLGNTDRHSIKKNLIGALLFDSGETAEATRLKRTARRRYTRRKNRICYLQEIFSNEMAKVDDSFFHRLEESFLVEEDKKHERHPIFGNIVDEVAYHEKYPTIYHLRKKLVDSTDKADLRLIYLALAHMIKFRGHFLIEGDLNPDNSDVDKLFIQLVQTYNQLFEENPINASGVDAKAILSARLSKSRRLENLIAQLPGEKKNGLFGNLIALSLGLTPNFKSNFDLAEDAKLQLSKDTYDDDLDNLLAQIGDQYADLFLAAKNLSDAILLSDILRVNTEITKAPLSASMIKRYDEHHQDLTLLKALVRQQLPEKYKEIFFDQSKNGYAGYIDGGASQEEFYKFIKPILEKMDGTEELLVKLNREDLLRKQRTFDNGSIPHQIHLGELHAILRRQEDFYPFLKDNREKIEKILTFRIPYYVGPLARGNSRFAWMTRKSEETITPWNFEEVVDKGASAQSFIERMTNFDKNLPNEKVLPKHSLLYEYFTVYNELTKVKYVTEGMRKPAFLSGEQKKAIVDLLFKTNRKVTVKQLKEDYFKKIECFDSVEISGVEDRFNASLGTYHDLLKIIKDKDFLDNEENEDILEDIVLTLTLFEDREMIEERLKTYAHLFDDKVMKQLKRRRYTGWGRLSRKLINGIRDKQSGKTILDFLKSDGFANRNFMQLIHDDSLTFKEDIQKAQVSGQGDSLHEHIANLAGSPAIKKGILQTVKVVDELVKVMGRHKPENIVIAMARENQTTQKGQKNSRERMKRIEEGIKELGSQILKEHPVENTQLQNEKLYLYYLQNGRDMYVDQELDINRLSDYDVDHIVPQSFLKDDSIDNKVLTRSDKNRGKSDNVPSEEVVKKMKNYWRQLLNAKLITQRKFDNLTKAERGGLSELDKAGFIKRQLVETRQITKHVAQILDSRMNTKYDENDKLIREVKVITLKSKLVSDFRKDFQFYKVREINNYHHAHDAYLNAVVGTALIKKYPKLESEFVYGDYKVYDVRKMIAKSEQEIGKATAKYFFYSNIMNFFKTEITLANGEIRKRPLIETNGETGEIVWDKGRDFATVRKVLSMPQVNIVKKTEVQTGGFSKESILPKRNSDKLIARKKDWDPKKYGGFDSPTVAYSVLVVAKVEKGKSKKLKSVKELLGITIMERSSFEKNPIDFLEAKGYKEVKKDLIIKLPKYSLFELENGRKRMLASAGELQKGNELALPSKYVNFLYLASHYEKLKGSPEDNEQKQLFVEQHKHYLDEIIEQISEFSKRVILADANLDKVLSAYNKHRDKPIREQAENIIHLFTLTNLGAPAAFKYFDTTIDRKRYTSTKEVLDATLIHQSITGLYETRIDLSQLGGD

SEQ ID NO: 87 - protein, 1368 aa, Unknown
  Synthetic
MDKKYSIGLDIGTNSVGWAVITDEYKVPSKKFKVLGNTDRHSIKKNLIGALLFDSGETAEATRLKRTARRRYTRRKNRICYLQEIFSNEMAKVDDSFFHRLEESFLVEEDKKHERHPIFGNIVDEVAYHEKYPTIYHLRKKLVDSTDKADLRLIYLALAHMIKFRGHFLIEGDLNPDNSDVDKLFIQLVQTYNQLFEENPINASGVDAKAILSARLSKSRRLENLIAQLPGEKKNGLFGNLIALSLGLTPNFKSNFDLAEDAKLQLSKDTYDDDLDNLLAQIGDQYADLFLAAKNLSDAILLSDILRVNTEITKAPLSASMIKRYDEHHQDLTLLKALVRQQLPEKYKEIFFDQSKNGYAGYIDGGASQEEFYKFIKPILEKMDGTEELLVKLNREDLLRKQRTFDNGSIPHQIHLGELHAILRRQEDFYPFLKDNREKIEKILTFRIPYYVGPLARGNSRFAWMTRKSEETITPWNFEEVVDKGASAQSFIERMTNFDKNLPNEKVLPKHSLLYEYFTVYNELTKVKYVTEGMRKPAFLSGEQKKAIVDLLFKTNRKVTVKQLKEDYFKKIECFDSVEISGVEDRFNASLGTYHDLLKIIKDKDFLDNEENEDILEDIVLTLTLFEDREMIEERLKTYAHLFDDKVMKQLKRRRYTGWGRLSRKLINGIRDKQSGKTILDFLKSDGFANRNFMQLIHDDSLTFKEDIQKAQVSGQGDSLHEHIANLAGSPAIKKGILQTVKVVDELVKVMGRHKPENIVIEMARENQTTQKGQKNSRERMKRIEEGIKELGSQILKEHPVENTQLQNEKLYLYYLQNGRDMYVDQELDINRLSDYDVDHIVPQSFLKDDSIDNKVLTRSDKNRGKSDNVPSEEVVKKMKNYWRQLLNAKLITQRKFDNLTKAERGGLSELDKAGFIKRQLVETRQITKHVAQILDSRMNTKYDENDKLIREVKVITLKSKLVSDFRKDFQFYKVREINNYHAAHDAYLNAVVGTALIKKYPKLESEFVYGDYKVYDVRKMIAKSEQEIGKATAKYFFYSNIMNFFKTEITLANGEIRKRPLIETNGETGEIVWDKGRDFATVRKVLSMPQVNIVKKTEVQTGGFSKESILPKRNSDKLIARKKDWDPKKYGGFDSPTVAYSVLVVAKVEKGKSKKLKSVKELLGITIMERSSFEKNPIDFLEAKGYKEVKKDLIIKLPKYSLFELENGRKRMLASAGELQKGNELALPSKYVNFLYLASHYEKLKGSPEDNEQKQLFVEQHKHYLDEIIEQISEFSKRVILADANLDKVLSAYNKHRDKPIREQAENIIHLFTLTNLGAPAAFKYFDTTIDRKRYTSTKEVLDATLIHQSITGLYETRIDLSQLGGD

SEQ ID NO: 88 - protein, 1368 aa, Unknown
  Synthetic
MDKKYSIGLDIGTNSVGWAVITDEYKVPSKKFKVLGNTDRHSIKKNLIGALLFDSGETAEATRLKRTARRRYTRRKNRICYLQEIFSNEMAKVDDSFFHRLEESFLVEEDKKHERHPIFGNIVDEVAYHEKYPTIYHLRKKLVDSTDKADLRLIYLALAHMIKFRGHFLIEGDLNPDNSDVDKLFIQLVQTYNQLFEENPINASGVDAKAILSARLSKSRRLENLIAQLPGEKKNGLFGNLIALSLGLTPNFKSNFDLAEDAKLQLSKDTYDDDLDNLLAQIGDQYADLFLAAKNLSDAILLSDILRVNTEITKAPLSASMIKRYDEHHQDLTLLKALVRQQLPEKYKEIFFDQSKNGYAGYIDGGASQEEFYKFIKPILEKMDGTEELLVKLNREDLLRKQRTFDNGSIPHQIHLGELHAILRRQEDFYPFLKDNREKIEKILTFRIPYYVGPLARGNSRFAWMTRKSEETITPWNFEEVVDKGASAQSFIERMTNFDKNLPNEKVLPKHSLLYEYFTVYNELTKVKYVTEGMRKPAFLSGEQKKAIVDLLFKTNRKVTVKQLKEDYFKKIECFDSVEISGVEDRFNASLGTYHDLLKIIKDKDFLDNEENEDILEDIVLTLTLFEDREMIEERLKTYAHLFDDKVMKQLKRRRYTGWGRLSRKLINGIRDKQSGKTILDFLKSDGFANRNFMQLIHDDSLTFKEDIQKAQVSGQGDSLHEHIANLAGSPAIKKGILQTVKVVDELVKVMGRHKPENIVIEMARENQTTQKGQKNSRERMKRIEEGIKELGSQILKEHPVENTQLQNEKLYLYYLQNGRDMYVDQELDINRLSDYDVDHIVPQSFLKDDSIDNKVLTRSDKNRGKSDNVPSEEVVKKMKNYWRQLLNAKLITQRKFDNLTKAERGGLSELDKAGFIKRQLVETRQITKHVAQILDSRMNTKYDENDKLIREVKVITLKSKLVSDFRKDFQFYKVREINNYHHAHAAYLNAVVGTALIKKYPKLESEFVYGDYKVYDVRKMIAKSEQEIGKATAKYFFYSNIMNFFKTEITLANGEIRKRPLIETNGETGEIVWDKGRDFATVRKVLSMPQVNIVKKTEVQTGGFSKESILPKRNSDKLIARKKDWDPKKYGGFDSPTVAYSVLVVAKVEKGKSKKLKSVKELLGITIMERSSFEKNPIDFLEAKGYKEVKKDLIIKLPKYSLFELENGRKRMLASAGELQKGNELALPSKYVNFLYLASHYEKLKGSPEDNEQKQLFVEQHKHYLDEIIEQISEFSKRVILADANLDKVLSAYNKHRDKPIREQAENIIHLFTLTNLGAPAAFKYFDTTIDRKRYTSTKEVLDATLIHQSITGLYETRIDLSQLGGD

SEQ ID NO: 89 - protein, 1368 aa, Unknown
  Synthetic
  misc_feature (840)..(840): Xaa can be any naturally occurring amino acid
MDKKYSIGLDIGTNSVGWAVITDEYKVPSKKFKVLGNTDRHSIKKNLIGALLFDSGETAEATRLKRTARRRYTRRKNRICYLQEIFSNEMAKVDDSFFHRLEESFLVEEDKKHERHPIFGNIVDEVAYHEKYPTIYHLRKKLVDSTDKADLRLIYLALAHMIKFRGHFLIEGDLNPDNSDVDKLFIQLVQTYNQLFEENPINASGVDAKAILSARLSKSRRLENLIAQLPGEKKNGLFGNLIALSLGLTPNFKSNFDLAEDAKLQLSKDTYDDDLDNLLAQIGDQYADLFLAAKNLSDAILLSDILRVNTEITKAPLSASMIKRYDEHHQDLTLLKALVRQQLPEKYKEIFFDQSKNGYAGYIDGGASQEEFYKFIKPILEKMDGTEELLVKLNREDLLRKQRTFDNGSIPHQIHLGELHAILRRQEDFYPFLKDNREKIEKILTFRIPYYVGPLARGNSRFAWMTRKSEETITPWNFEEVVDKGASAQSFIERMTNFDKNLPNEKVLPKHSLLYEYFTVYNELTKVKYVTEGMRKPAFLSGEQKKAIVDLLFKTNRKVTVKQLKEDYFKKIECFDSVEISGVEDRFNASLGTYHDLLKIIKDKDFLDNEENEDILEDIVLTLTLFEDREMIEERLKTYAHLFDDKVMKQLKRRRYTGWGRLSRKLINGIRDKQSGKTILDFLKSDGFANRNFMQLIHDDSLTFKEDIQKAQVSGQGDSLHEHIANLAGSPAIKKGILQTVKVVDELVKVMGRHKPENIVIEMARENQTTQKGQKNSRERMKRIEEGIKELGSQILKEHPVENTQLQNEKLYLYYLQNGRDMYVDQELDINRLSDYDVDXIVPQSFLKDDSIDNKVLTRSDKNRGKSDNVPSEEVVKKMKNYWRQLLNAKLITQRKFDNLTKAERGGLSELDKAGFIKRQLVETRQITKHVAQILDSRMNTKYDENDKLIREVKVITLKSKLVSDFRKDFQFYKVREINNYHHAHDAYLNAVVGTALIKKYPKLESEFVYGDYKVYDVRKMIAKSEQEIGKATAKYFFYSNIMNFFKTEITLANGEIRKRPLIETNGETGEIVWDKGRDFATVRKVLSMPQVNIVKKTEVQTGGFSKESILPKRNSDKLIARKKDWDPKKYGGFDSPTVAYSVLVVAKVEKGKSKKLKSVKELLGITIMERSSFEKNPIDFLEAKGYKEVKKDLIIKLPKYSLFELENGRKRMLASAGELQKGNELALPSKYVNFLYLASHYEKLKGSPEDNEQKQLFVEQHKHYLDEIIEQISEFSKRVILADANLDKVLSAYNKHRDKPIREQAENIIHLFTLTNLGAPAAFKYFDTTIDRKRYTSTKEVLDATLIHQSITGLYETRIDLSQLGGD

SEQ ID NO: 90 - protein, 1368 aa, Unknown
  Synthetic
MDKKYSIGLDIGTNSVGWAVITDEYKVPSKKFKVLGNTDRHSIKKNLIGALLFDSGETAEATRLKRTARRRYTRRKNRICYLQEIFSNEMAKVDDSFFHRLEESFLVEEDKKHERHPIFGNIVDEVAYHEKYPTIYHLRKKLVDSTDKADLRLIYLALAHMIKFRGHFLIEGDLNPDNSDVDKLFIQLVQTYNQLFEENPINASGVDAKAILSARLSKSRRLENLIAQLPGEKKNGLFGNLIALSLGLTPNFKSNFDLAEDAKLQLSKDTYDDDLDNLLAQIGDQYADLFLAAKNLSDAILLSDILRVNTEITKAPLSASMIKRYDEHHQDLTLLKALVRQQLPEKYKEIFFDQSKNGYAGYIDGGASQEEFYKFIKPILEKMDGTEELLVKLNREDLLRKQRTFDNGSIPHQIHLGELHAILRRQEDFYPFLKDNREKIEKILTFRIPYYVGPLARGNSRFAWMTRKSEETITPWNFEEVVDKGASAQSFIERMTNFDKNLPNEKVLPKHSLLYEYFTVYNELTKVKYVTEGMRKPAFLSGEQKKAIVDLLFKTNRKVTVKQLKEDYFKKIECFDSVEISGVEDRFNASLGTYHDLLKIIKDKDFLDNEENEDILEDIVLTLTLFEDREMIEERLKTYAHLFDDKVMKQLKRRRYTGWGRLSRKLINGIRDKQSGKTILDFLKSDGFANRNFMQLIHDDSLTFKEDIQKAQVSGQGDSLHEHIANLAGSPAIKKGILQTVKVVDELVKVMGRHKPENIVIEMARENQTTQKGQKNSRERMKRIEEGIKELGSQILKEHPVENTQLQNEKLYLYYLQNGRDMYVDQELDINRLSDYDVDAIVPQSFLKDDSIDNKVLTRSDKNRGKSDNVPSEEVVKKMKNYWRQLLNAKLITQRKFDNLTKAERGGLSELDKAGFIKRQLVETRQITKHVAQILDSRMNTKYDENDKLIREVKVITLKSKLVSDFRKDFQFYKVREINNYHHAHDAYLNAVVGTALIKKYPKLESEFVYGDYKVYDVRKMIAKSEQEIGKATAKYFFYSNIMNFFKTEITLANGEIRKRPLIETNGETGEIVWDKGRDFATVRKVLSMPQVNIVKKTEVQTGGFSKESILPKRNSDKLIARKKDWDPKKYGGFDSPTVAYSVLVVAKVEKGKSKKLKSVKELLGITIMERSSFEKNPIDFLEAKGYKEVKKDLIIKLPKYSLFELENGRKRMLASAGELQKGNELALPSKYVNFLYLASHYEKLKGSPEDNEQKQLFVEQHKHYLDEIIEQISEFSKRVILADANLDKVLSAYNKHRDKPIREQAENIIHLFTLTNLGAPAAFKYFDTTIDRKRYTSTKEVLDATLIHQSITGLYETRIDLSQLGGD

SEQ ID NO: 91 - protein, 1368 aa, Unknown
  Synthetic
  misc_feature (864)..(864): Xaa can be any naturally occurring amino acid
MDKKYSIGLDIGTNSVGWAVITDEYKVPSKKFKVLGNTDRHSIKKNLIGALLFDSGETAEATRLKRTARRRYTRRKNRICYLQEIFSNEMAKVDDSFFHRLEESFLVEEDKKHERHPIFGNIVDEVAYHEKYPTIYHLRKKLVDSTDKADLRLIYLALAHMIKFRGHFLIEGDLNPDNSDVDKLFIQLVQTYNQLFEENPINASGVDAKAILSARLSKSRRLENLIAQLPGEKKNGLFGNLIALSLGLTPNFKSNFDLAEDAKLQLSKDTYDDDLDNLLAQIGDQYADLFLAAKNLSDAILLSDILRVNTEITKAPLSASMIKRYDEHHQDLTLLKALVRQQLPEKYKEIFFDQSKNGYAGYIDGGASQEEFYKFIKPILEKMDGTEELLVKLNREDLLRKQRTFDNGSIPHQIHLGELHAILRRQEDFYPFLKDNREKIEKILTFRIPYYVGPLARGNSRFAWMTRKSEETITPWNFEEVVDKGASAQSFIERMTNFDKNLPNEKVLPKHSLLYEYFTVYNELTKVKYVTEGMRKPAFLSGEQKKAIVDLLFKTNRKVTVKQLKEDYFKKIECFDSVEISGVEDRFNASLGTYHDLLKIIKDKDFLDNEENEDILEDIVLTLTLFEDREMIEERLKTYAHLFDDKVMKQLKRRRYTGWGRLSRKLINGIRDKQSGKTILDFLKSDGFANRNFMQLIHDDSLTFKEDIQKAQVSGQGDSLHEHIANLAGSPAIKKGILQTVKVVDELVKVMGRHKPENIVIEMARENQTTQKGQKNSRERMKRIEEGIKELGSQILKEHPVENTQLQNEKLYLYYLQNGRDMYVDQELDINRLSDYDVDHIVPQSFLKDDSIDNKVLTRSDKNXGKSDNVPSEEVVKKMKNYWRQLLNAKLITQRKFDNLTKAERGGLSELDKAGFIKRQLVETRQITKHVAQILDSRMNTKYDENDKLIREVKVITLKSKLVSDFRKDFQFYKVREINNYHHAHDAYLNAVVGTALIKKYPKLESEFVYGDYKVYDVRKMIAKSEQEIGKATAKYFFYSNIMNFFKTEITLANGEIRKRPLIETNGETGEIVWDKGRDFATVRKVLSMPQVNIVKKTEVQTGGFSKESILPKRNSDKLIARKKDWDPKKYGGFDSPTVAYSVLVVAKVEKGKSKKLKSVKELLGITIMERSSFEKNPIDFLEAKGYKEVKKDLIIKLPKYSLFELENGRKRMLASAGELQKGNELALPSKYVNFLYLASHYEKLKGSPEDNEQKQLFVEQHKHYLDEIIEQISEFSKRVILADANLDKVLSAYNKHRDKPIREQAENIIHLFTLTNLGAPAAFKYFDTTIDRKRYTSTKEVLDATLIHQSITGLYETRIDLSQLGGD

SEQ ID NO: 92 - protein, 1368 aa, Unknown
  Synthetic
MDKKYSIGLDIGTNSVGWAVITDEYKVPSKKFKVLGNTDRHSIKKNLIGALLFDSGETAEATRLKRTARRRYTRRKNRICYLQEIFSNEMAKVDDSFFHRLEESFLVEEDKKHERHPIFGNIVDEVAYHEKYPTIYHLRKKLVDSTDKADLRLIYLALAHMIKFRGHFLIEGDLNPDNSDVDKLFIQLVQTYNQLFEENPINASGVDAKAILSARLSKSRRLENLIAQLPGEKKNGLFGNLIALSLGLTPNFKSNFDLAEDAKLQLSKDTYDDDLDNLLAQIGDQYADLFLAAKNLSDAILLSDILRVNTEITKAPLSASMIKRYDEHHQDLTLLKALVRQQLPEKYKEIFFDQSKNGYAGYIDGGASQEEFYKFIKPILEKMDGTEELLVKLNREDLLRKQRTFDNGSIPHQIHLGELHAILRRQEDFYPFLKDNREKIEKILTFRIPYYVGPLARGNSRFAWMTRKSEETITPWNFEEVVDKGASAQSFIERMTNFDKNLPNEKVLPKHSLLYEYFTVYNELTKVKYVTEGMRKPAFLSGEQKKAIVDLLFKTNRKVTVKQLKEDYFKKIECFDSVEISGVEDRFNASLGTYHDLLKIIKDKDFLDNEENEDILEDIVLTLTLFEDREMIEERLKTYAHLFDDKVMKQLKRRRYTGWGRLSRKLINGIRDKQSGKTILDFLKSDGFANRNFMQLIHDDSLTFKEDIQKAQVSGQGDSLHEHIANLAGSPAIKKGILQTVKVVDELVKVMGRHKPENIVIEMARENQTTQKGQKNSRERMKRIEEGIKELGSQILKEHPVENTQLQNEKLYLYYLQNGRDMYVDQELDINRLSDYDVDHIVPQSFLKDDSIDNKVLTRSDKNAGKSDNVPSEEVVKKMKNYWRQLLNAKLITQRKFDNLTKAERGGLSELDKAGFIKRQLVETRQITKHVAQILDSRMNTKYDENDKLIREVKVITLKSKLVSDFRKDFQFYKVREINNYHHAHDAYLNAVVGTALIKKYPKLESEFVYGDYKVYDVRKMIAKSEQEIGKATAKYFFYSNIMNFFKTEITLANGEIRKRPLIETNGETGEIVWDKGRDFATVRKVLSMPQVNIVKKTEVQTGGFSKESILPKRNSDKLIARKKDWDPKKYGGFDSPTVAYSVLVVAKVEKGKSKKLKSVKELLGITIMERSSFEKNPIDFLEAKGYKEVKKDLIIKLPKYSLFELENGRKRMLASAGELQKGNELALPSKYVNFLYLASHYEKLKGSPEDNEQKQLFVEQHKHYLDEIIEQISEFSKRVILADANLDKVLSAYNKHRDKPIREQAENIIHLFTLTNLGAPAAFKYFDTTIDRKRYTSTKEVLDATLIHQSITGLYETRIDLSQLGGD

SEQ ID NO: 93 - protein, 1367 aa, Unknown
  Synthetic
  misc_feature (839)..(839): Xaa can be any naturally occurring amino acid
DKKYSIGLDIGTNSVGWAVITDEYKVPSKKFKVLGNTDRHSIKKNLIGALLFDSGETAEATRLKRTARRRYTRRKNRICYLQEIFSNEMAKVDDSFFHRLEESFLVEEDKKHERHPIFGNIVDEVAYHEKYPTIYHLRKKLVDSTDKADLRLIYLALAHMIKFRGHFLIEGDLNPDNSDVDKLFIQLVQTYNQLFEENPINASGVDAKAILSARLSKSRRLENLIAQLPGEKKNGLFGNLIALSLGLTPNFKSNFDLAEDAKLQLSKDTYDDDLDNLLAQIGDQYADLFLAAKNLSDAILLSDILRVNTEITKAPLSASMIKRYDEHHQDLTLLKALVRQQLPEKYKEIFFDQSKNGYAGYIDGGASQEEFYKFIKPILEKMDGTEELLVKLNREDLLRKQRTFDNGSIPHQIHLGELHAILRRQEDFYPFLKDNREKIEKILTFRIPYYVGPLARGNSRFAWMTRKSEETITPWNFEEVVDKGASAQSFIERMTNFDKNLPNEKVLPKHSLLYEYFTVYNELTKVKYVTEGMRKPAFLSGEQKKAIVDLLFKTNRKVTVKQLKEDYFKKIECFDSVEISGVEDRFNASLGTYHDLLKIIKDKDFLDNEENEDILEDIVLTLTLFEDREMIEERLKTYAHLFDDKVMKQLKRRRYTGWGRLSRKLINGIRDKQSGKTILDFLKSDGFANRNFMQLIHDDSLTFKEDIQKAQVSGQGDSLHEHIANLAGSPAIKKGILQTVKVVDELVKVMGRHKPENIVIEMARENQTTQKGQKNSRERMKRIEEGIKELGSQILKEHPVENTQLQNEKLYLYYLQNGRDMYVDQELDINRLSDYDVDXIVPQSFLKDDSIDNKVLTRSDKNRGKSDNVPSEEVVKKMKNYWRQLLNAKLITQRKFDNLTKAERGGLSELDKAGFIKRQLVETRQITKHVAQILDSRMNTKYDENDKLIREVKVITLKSKLVSDFRKDFQFYKVREINNYHHAHDAYLNAVVGTALIKKYPKLESEFVYGDYKVYDVRKMIAKSEQEIGKATAKYFFYSNIMNFFKTEITLANGEIRKRPLIETNGETGEIVWDKGRDFATVRKVLSMPQVNIVKKTEVQTGGFSKESILPKRNSDKLIARKKDWDPKKYGGFDSPTVAYSVLVVAKVEKGKSKKLKSVKELLGITIMERSSFEKNPIDFLEAKGYKEVKKDLIIKLPKYSLFELENGRKRMLASAGELQKGNELALPSKYVNFLYLASHYEKLKGSPEDNEQKQLFVEQHKHYLDEIIEQISEFSKRVILADANLDKVLSAYNKHRDKPIREQAENIIHLFTLTNLGAPAAFKYFDTTIDRKRYTSTKEVLDATLIHQSITGLYETRIDLSQLGGD

SEQ ID NO: 94 - protein, 1367 aa, Unknown
  Synthetic
DKKYSIGLDIGTNSVGWAVITDEYKVPSKKFKVLGNTDRHSIKKNLIGALLFDSGETAEATRLKRTARRRYTRRKNRICYLQEIFSNEMAKVDDSFFHRLEESFLVEEDKKHERHPIFGNIVDEVAYHEKYPTIYHLRKKLVDSTDKADLRLIYLALAHMIKFRGHFLIEGDLNPDNSDVDKLFIQLVQTYNQLFEENPINASGVDAKAILSARLSKSRRLENLIAQLPGEKKNGLFGNLIALSLGLTPNFKSNFDLAEDAKLQLSKDTYDDDLDNLLAQIGDQYADLFLAAKNLSDAILLSDILRVNTEITKAPLSASMIKRYDEHHQDLTLLKALVRQQLPEKYKEIFFDQSKNGYAGYIDGGASQEEFYKFIKPILEKMDGTEELLVKLNREDLLRKQRTFDNGSIPHQIHLGELHAILRRQEDFYPFLKDNREKIEKILTFRIPYYVGPLARGNSRFAWMTRKSEETITPWNFEEVVDKGASAQSFIERMTNFDKNLPNEKVLPKHSLLYEYFTVYNELTKVKYVTEGMRKPAFLSGEQKKAIVDLLFKTNRKVTVKQLKEDYFKKIECFDSVEISGVEDRFNASLGTYHDLLKIIKDKDFLDNEENEDILEDIVLTLTLFEDREMIEERLKTYAHLFDDKVMKQLKRRRYTGWGRLSRKLINGIRDKQSGKTILDFLKSDGFANRNFMQLIHDDSLTFKEDIQKAQVSGQGDSLHEHIANLAGSPAIKKGILQTVKVVDELVKVMGRHKPENIVIEMARENQTTQKGQKNSRERMKRIEEGIKELGSQILKEHPVENTQLQNEKLYLYYLQNGRDMYVDQELDINRLSDYDVDAIVPQSFLKDDSIDNKVLTRSDKNRGKSDNVPSEEVVKKMKNYWRQLLNAKLITQRKFDNLTKAERGGLSELDKAGFIKRQLVETRQITKHVAQILDSRMNTKYDENDKLIREVKVITLKSKLVSDFRKDFQFYKVREINNYHHAHDAYLNAVVGTALIKKYPKLESEFVYGDYKVYDVRKMIAKSEQEIGKATAKYFFYSNIMNFFKTEITLANGEIRKRPLIETNGETGEIVWDKGRDFATVRKVLSMPQVNIVKKTEVQTGGFSKESILPKRNSDKLIARKKDWDPKKYGGFDSPTVAYSVLVVAKVEKGKSKKLKSVKELLGITIMERSSFEKNPIDFLEAKGYKEVKKDLIIKLPKYSLFELENGRKRMLASAGELQKGNELALPSKYVNFLYLASHYEKLKGSPEDNEQKQLFVEQHKHYLDEIIEQISEFSKRVILADANLDKVLSAYNKHRDKPIREQAENIIHLFTLTNLGAPAAFKYFDTTIDRKRYTSTKEVLDATLIHQSITGLYETRIDLSQLGGD

SEQ ID NO: 95 - protein, 1367 aa, Unknown
  Synthetic
  misc_feature (863)..(863): Xaa can be any naturally occurring amino acid
DKKYSIGLDIGTNSVGWAVITDEYKVPSKKFKVLGNTDRHSIKKNLIGALLFDSGETAEATRLKRTARRRYTRRKNRICYLQEIFSNEMAKVDDSFFHRLEESFLVEEDKKHERHPIFGNIVDEVAYHEKYPTIYHLRKKLVDSTDKADLRLIYLALAHMIKFRGHFLIEGDLNPDNSDVDKLFIQLVQTYNQLFEENPINASGVDAKAILSARLSKSRRLENLIAQLPGEKKNGLFGNLIALSLGLTPNFKSNFDLAEDAKLQLSKDTYDDDLDNLLAQIGDQYADLFLAAKNLSDAILLSDILRVNTEITKAPLSASMIKRYDEHHQDLTLLKALVRQQLPEKYKEIFFDQSKNGYAGYIDGGASQEEFYKFIKPILEKMDGTEELLVKLNREDLLRKQRTFDNGSIPHQIHLGELHAILRRQEDFYPFLKDNREKIEKILTFRIPYYVGPLARGNSRFAWMTRKSEETITPWNFEEVVDKGASAQSFIERMTNFDKNLPNEKVLPKHSLLYEYFTVYNELTKVKYVTEGMRKPAFLSGEQKKAIVDLLFKTNRKVTVKQLKEDYFKKIECFDSVEISGVEDRFNASLGTYHDLLKIIKDKDFLDNEENEDILEDIVLTLTLFEDREMIEERLKTYAHLFDDKVMKQLKRRRYTGWGRLSRKLINGIRDKQSGKTILDFLKSDGFANRNFMQLIHDDSLTFKEDIQKAQVSGQGDSLHEHIANLAGSPAIKKGILQTVKVVDELVKVMGRHKPENIVIEMARENQTTQKGQKNSRERMKRIEEGIKELGSQILKEHPVENTQLQNEKLYLYYLQNGRDMYVDQELDINRLSDYDVDHIVPQSFLKDDSIDNKVLTRSDKNXGKSDNVPSEEVVKKMKNYWRQLLNAKLITQRKFDNLTKAERGGLSELDKAGFIKRQLVETRQITKHVAQILDSRMNTKYDENDKLIREVKVITLKSKLVSDFRKDFQFYKVREINNYHHAHDAYLNAVVGTALIKKYPKLESEFVYGDYKVYDVRKMIAKSEQEIGKATAKYFFYSNIMNFFKTEITLANGEIRKRPLIETNGETGEIVWDKGRDFATVRKVLSMPQVNIVKKTEVQTGGFSKESILPKRNSDKLIARKKDWDPKKYGGFDSPTVAYSVLVVAKVEKGKSKKLKSVKELLGITIMERSSFEKNPIDFLEAKGYKEVKKDLIIKLPKYSLFELENGRKRMLASAGELQKGNELALPSKYVNFLYLASHYEKLKGSPEDNEQKQLFVEQHKHYLDEIIEQISEFSKRVILADANLDKVLSAYNKHRDKPIREQAENIIHLFTLTNLGAPAAFKYFDTTIDRKRYTSTKEVLDATLIHQSITGLYETRIDLSQLGGD

SEQ ID NO: 96 - protein, 1367 aa, Unknown
  Synthetic
DKKYSIGLDIGTNSVGWAVITDEYKVPSKKFKVLGNTDRHSIKKNLIGALLFDSGETAEATRLKRTARRRYTRRKNRICYLQEIFSNEMAKVDDSFFHRLEESFLVEEDKKHERHPIFGNIVDEVAYHEKYPTIYHLRKKLVDSTDKADLRLIYLALAHMIKFRGHFLIEGDLNPDNSDVDKLFIQLVQTYNQLFEENPINASGVDAKAILSARLSKSRRLENLIAQLPGEKKNGLFGNLIALSLGLTPNFKSNFDLAEDAKLQLSKDTYDDDLDNLLAQIGDQYADLFLAAKNLSDAILLSDILRVNTEITKAPLSASMIKRYDEHHQDLTLLKALVRQQLPEKYKEIFFDQSKNGYAGYIDGGASQEEFYKFIKPILEKMDGTEELLVKLNREDLLRKQRTFDNGSIPHQIHLGELHAILRRQEDFYPFLKDNREKIEKILTFRIPYYVGPLARGNSRFAWMTRKSEETITPWNFEEVVDKGASAQSFIERMTNFDKNLPNEKVLPKHSLLYEYFTVYNELTKVKYVTEGMRKPAFLSGEQKKAIVDLLFKTNRKVTVKQLKEDYFKKIECFDSVEISGVEDRFNASLGTYHDLLKIIKDKDFLDNEENEDILEDIVLTLTLFEDREMIEERLKTYAHLFDDKVMKQLKRRRYTGWGRLSRKLINGIRDKQSGKTILDFLKSDGFANRNFMQLIHDDSLTFKEDIQKAQVSGQGDSLHEHIANLAGSPAIKKGILQTVKVVDELVKVMGRHKPENIVIEMARENQTTQKGQKNSRERMKRIEEGIKELGSQILKEHPVENTQLQNEKLYLYYLQNGRDMYVDQELDINRLSDYDVDHIVPQSFLKDDSIDNKVLTRSDKNAGKSDNVPSEEVVKKMKNYWRQLLNAKLITQRKFDNLTKAERGGLSELDKAGFIKRQLVETRQITKHVAQILDSRMNTKYDENDKLIREVKVITLKSKLVSDFRKDFQFYKVREINNYHHAHDAYLNAVVGTALIKKYPKLESEFVYGDYKVYDVRKMIAKSEQEIGKATAKYFFYSNIMNFFKTEITLANGEIRKRPLIETNGETGEIVWDKGRDFATVRKVLSMPQVNIVKKTEVQTGGFSKESILPKRNSDKLIARKKDWDPKKYGGFDSPTVAYSVLVVAKVEKGKSKKLKSVKELLGITIMERSSFEKNPIDFLEAKGYKEVKKDLIIKLPKYSLFELENGRKRMLASAGELQKGNELALPSKYVNFLYLASHYEKLKGSPEDNEQKQLFVEQHKHYLDEIIEQISEFSKRVILADANLDKVLSAYNKHRDKPIREQAENIIHLFTLTNLGAPAAFKYFDTTIDRKRYTSTKEVLDATLIHQSITGLYETRIDLSQLGGD

SEQ ID NO: 97 - protein, 1082 aa, Unknown
  Synthetic
MAAFKPNSINYILGLDIGIASVGWAMVEIDEEENPIRLIDLGVRVFERAEVPKTGDSLAMARRLARSVRRLTRRRAHRLLRTRRLLKREGVLQAANFDENGLIKSLPNTPWQLRAAALDRKLTPLEWSAVLLHLIKHRGYLSQRKNEGETADKELGALLKGVAGNAHALQTGDFRTPAELALNKFEKESGHIRNQRSDYSHTFSRKDLQAELILLFEKQKEFGNPHVSGGLKEGIETLLMTQRPALSGDAVQKMLGHCTFEPAEPKAAKNTYTAERFIWLTKLNNLRILEQGSERPLTDTERATLMDEPYRKSKLTYAQARKLLGLEDTAFFKGLRYGKDNAEASTLMEMKAYHAISRALEKEGLKDKKSPLNLSPELQDEIGTAFSLFKTDEDITGRLKDRIQPEILEALLKHISFDKFVQISLKALRRIVPLMEQGKRYDEACAEIYGDHYGKKNTEEKIYLPPIPADEIRNPVVLRALSQARKVINGVVRRYGSPARIHIETAREVGKSFKDRKEIEKRQEENRKDREKAAAKFREYFPNFVGEPKSKDILKLRLYEQQHGKCLYSGKEINLGRLNEKGYVEIDAALPFSRTWDDSFNNKVLVLGSENQNKGNQTPYEYFNGKDNSREWQEFKARVETSRFPRSKKQRILLQKFDEDGFKERNLNDTRYVNRFLCQFVADRMRLTGKGKKRVFASNGQITNLLRGFWGLRKVRAENDRHHALDAVVVACSTVAMQQKITRFVRYKEMNAFDGKTIDKETGEVLHQKTHFPQPWEFFAQEVMIRVFGKPDGKPEFEEADTLEKLRTLLAEKLSSRPEAVHEYVTPLFVSRAPNRKMSGQGHMETVKSAKRLDEGVSVLRVPLTQLKLKDLEKMVNREREPKLYEALKARLEAHKDDPAKAFAEPFYKYDKAGNRTQQVKAVRVEQVQKTGVWVRNHNGIADNATMVRVDVFEKGDKYYLVPIYSWQVAKGILPDRAVVQGKDEEDWQLIDDSFNFKFSLHPNDLVEVITKKARMFGYFASCHRGTGNINIRIHDLDHKIGKNGILEGIGVKTALSFQKYQIDELGKEIRPCRLKKRPPVR

SEQ ID NO: 98 - protein, 984 aa, Unknown
  Synthetic
MARILAFDIGISSIGWAFSENDELKDCGVRIFTKVENPKTGESLALPRRLARSARKRLARRKARLNHLKHLIANEFKLNYEDYQSFDESLAKAYKGSLISPYELRFRALNELLSKQDFARVILHIAKRRGYDDIKNSDDKEKGAILKAIKQNEEKLANYQSVGEYLYKEYFQKFKENSKEFTNVRNKKESYERCIAQSFLKDELKLIFKKQREFGFSFSKKFEEEVLSVAFYKRALKDFSHLVGNCSFFTDEKRAPKNSPLAFMFVALTRIINLLNNLKNTEGILYTKDDLNALLNEVLKNGTLTYKQTKKLLGLSDDYEFKGEKGTYFIEFKKYKEFIKALGEHNLSQDDLNEIAKDITLIKDEIKLKKALAKYDLNQNQIDSLSKLEFKDHLNISFKALKLVTPLMLEGKKYDEACNELNLKVAINEDKKDFLPAFNETYYKDEVTNPVVLRAIKEYRKVLNALLKKYGKVHKINIELAREVGKNHSQRAKIEKEQNENYKAKKDAELECEKLGLKINSKNILKLRLFKEQKEFCAYSGEKIKISDLQDEKMLEIDHIYPYSRSFDDSYMNKVLVFTKQNQEKLNQTPFEAFGNDSAKWQKIEVLAKNLPTKKQKRILDKNYKDKEQKNFKDRNLNDTRYIARLVLNYTKDYLDFLPLSDDENTKLNDTQKGSKVHVEAKSGMLTSALRHTWGFSAKDRNNHLHHAIDAVIIAYANNSIVKAFSDFKKEQESNSAELYAKKISELDYKNKRKFFEPFSGFRQKVLDKIDEIFVSKPERKKPSGALHEETFRKEEEFYQSYGGKEGVLKALELGKIRKVNGKIVKNGDMFRVDIFKHKKTNKFYAVPIYTMDFALKVLPNKAVARSKKGEIKDWILMDENYEFCFSLYKDSLILIQTKDMQEPEFVYYNAFTSSTVSLIVSKHDNKFETLSKNQKILFKNANEKEVIAKSIGIQNLKVFEKYIVSALGEVTKAEFRQREDFKK

SEQ ID NO: 99 - protein, 1087 aa, Unknown
  Synthetic
MRYKIGLDIGITSVGWAVMNLDIPRIEDLGVRIFDRAENPQTGESLALPRRLARSARRRLRRRKHRLERIRRLVIREGILTKEELDKLFEEKHEIDVWQLRVEALDRKLNNDELARVLLHLAKRRGFKSNRKSERSNKENSTMLKHIEENRAILSSYRTVGEMIVKDPKFALHKRNKGENYTNTIARDDLEREIRLIFSKQREFGNMSCTEEFENEYITIWASQRPVASKDDIEKKVGFCTFEPKEKRAPKATYTFQSFIAWEHINKLRLISPSGARGLTDEERRLLYEQAFQKNKITYHDIRTLLHLPDDTYFKGIVYDRGESRKQNENIRFLELDAYHQIRKAVDKVYGKGKSSSFLPIDFDTFGYALTLFKDDADIHSYLRNEYEQNGKRMPNLANKVYDNELIEELLNLSFTKFGHLSLKALRSILPYMEQGEVYSSACERAGYTFTGPKKKQKTMLLPNIPPIANPVVMRALTQARKVVNAIIKKYGSPVSIHIELARDLSQTFDERRKTKKEQDENRKKNETAIRQLMEYGLTLNPTGHDIVKFKLWSEQNGRCAYSLQPIEIERLLEPGYVEVDHVIPYSRSLDDSYTNKVLVLTRENREKGNRIPAEYLGVGTERWQQFETFVLTNKQFSKKKRDRLLRLHYDENEETEFKNRNLNDTRYISRFFANFIREHLKFAESDDKQKVYTVNGRVTAHLRSRWEFNKNREESDLHHAVDAVIVACTTPSDIAKVTAFYQRREQNKELAKKTEPHFPQPWPHFADELRARLSKHPKESIKALNLGNYDDQKLESLQPVFVSRMPKRSVTGAAHQETLRRYVGIDERSGKIQTVVKTKLSEIKLDASGHFPMYGKESDPRTYEAIRQRLLEHNNDPKKAFQEPLYKPKKNGEPGPVIRTVKIIDTKNQVIPLNDGKTVAYNSNIVRVDVFEKDGKYYCVPVYTMDIMKGILPNKAIEPNKPYSEWKEMTEDYTFRFSLYPNDLIRIELPREKTVKTAAGEEINVKDVFVYYKTIDSANGGLELISHDHRFSLRGVGSRTLKRFEKYQVDVLGNIYKVRGEKRVGLASSAHSKPGKTIRPLQSTRD

SEQ ID NO: 100 - protein, 1228 aa, Unknown
  Synthetic
MSKLEKFTNCYSLSKTLRFKAIPVGKTQENIDNKRLLVEDEKRAEDYKGVKKLLDRYYLSFINDVLHSIKLKNLNNYISLFRKKTRTEKENKELENLEINLRKEIAKAFKGNEGYKSLFKKDIIETILPEFLDDKDEIALVNSFNGFTTAFTGFFDNRENMFSEEAKSTSIAFRCINENLTRYISNMDIFEKVDAIFDKHEVQEIKEKILNSDYDVEDFFEGEFFNFVLTQEGIDVYNAIIGGFVTESGEKIKGLNEYINLYNQKTKQKLPKFKPLYKQVLSDRESLSFYGEGYTSDEEVLEVFRNTLNKNSEIFSSIKKLEKLFKNFDEYSSAGIFVKNGPAISTISKDIFGEWNVIRDKWNAEYDDIHLKKKAVVTEKYEDDRRKSFKKIGSFSLEQLQEYADADLSVVEKLKEIIIQKVDEIYKVYGSSEKLFDADFVLEKSLKKNDAVVAIMKDLLDSVKSFENYIKAFFGEGKETNRDESFYGDFVLAYDILLKVDHIYDAIRNYVTQKPYSKDKFKLYFQNPQFMGGWDKDKETDYRATILRYGSKYYLAIMDKKYAKCLQKIDKDDVNGNYEKINYKLLPGPNKMLPKVFFSKKWMAYYNPSEDIQKIYKNGTFKKGDMFNLNDCHKLIDFFKDSISRYPKWSNAYDFNFSETEKYKDIAGFYREVEEQGYKVSFESASKKEVDKLVEEGKLYMFQIYNKDFSDKSHGTPNLHTMYFKLLFDENNHGQIRLSGGAELFMRRASLKKEELVVHPANSPIANKNPDNPKKTTTLSYDVYKDKRFSEDQYELHIPIAINKCPKNIFKINTEVRVLLKHDDNPYVIGIDRGERNLLYIVVVDGKGNIVEQYSLNEIINNFNGIRIKTDYHSLLDKKEKERFEARQNWTSIENIKELKAGYISQVVHKICELVEKYDAVIALEDLNSGFKNSRVKVEKQVYQKFEKMLIDKLNYMVDKKSNPCATGGALKGYQITNKFESFKSMSTQNGFIFYIPAWLTSKIDPSTGFVNLLKTKYTSIADSKKFISSFDRIMYVPEEDLFEFALDYKNFSRTDADYIKKWKLYSYGNRIRIFRNPKKNNVFDWEEVCLTSAYKELFNKYGINYQQGDIRALLCEQSDKAFYSSFMALMSLMLQMRNSITGRTDVDFLISPVKNSDGIFYDSRNYEAQENAILPKNADANGAYNIARKVLWAIGQFKKAEDEKLDKVKIAISNKEWLEYAQTSVKH

SEQ ID NO: 101 - protein, 1108 aa, Unknown
  Synthetic
MATRSFILKIEPNEEVKKGLWKTHEVLNHGIAYYMNILKLIRQEAIYEHHEQDPKNPKKVSKAEIQAELWDFVLKMQKCNSFTHEVDKDEVFNILRELYEELVPSSVEKKGEANQLSNKFLYPLVDPNSQSGKGTASSGRKPRWYNLKIAGDPSWEEEKKKWEEDKKKDPLAKILGKLAEYGLIPLFIPYTDSNEPIVKEIKWMEKSRNQSVRRLDKDMFIQALERFLSWESWNLKVKEEYEKVEKEYKTLEERIKEDIQALKALEQYEKERQEQLLRDTLNTNEYRLSKRGLRGWREIIQKWLKMDENEPSEKYLEVFKDYQRKHPREAGDYSVYEFLSKKENHFIWRNHPEYPYLYATFCEIDKKKKDAKQQATFTLADPINHPLWVRFEERSGSNLNKYRILTEQLHTEKLKKKLTVQLDRLIYPTESGGWEEKGKVDIVLLPSRQFYNQIFLDIEEKGKHAFTYKDESIKFPLKGTLGGARVQFDRDHLRRYPHKVESGNVGRIYFNMTVNIEPTESPVSKSLKIHRDDFPKVVNFKPKELTEWIKDSKGKKLKSGIESLEIGLRVMSIDLGQRQAAAASIFEVVDQKPDIEGKLFFPIKGTELYAVHRASFNIKLPGETLVKSREVLRKAREDNLKLMNQKLNFLRNVLHFQQFEDITEREKRVTKWISRQENSDVPLVYQDELIQIRELMYKPYKDWVAFLKQLHKRLEVEIGKEVKHWRKSLSDGRKGLYGISLKNIDEIDRTRKFLLRWSLRPTEPGEVRRLEPGQRFAIDQLNHLNALKEDRLKKMANTIIMHALGYCYDVRKKKWQAKNPACQIILFEDLSNYNPYEERSRFENSKLMKWSRREIPRQVALQGEIYGLQVGEVGAQFSSRFHAKTGSPGIRCSVVTKEKLQDNRFFKNLQREGRLTLDKIAVLKEGDLYPDKGGEKFISLSKDRKCVTTHADINAAQNLQKRFWTRTHGFYKVYCKAYQVDGQTVYIPESKDQKQKIIEEFGEGYFILKDGVYEWVNAGKLKIKKGSSKQSSSELVDSDILKDSFDLASELKGEKLMLYRDPSGNVFPSDKWMAAGVFFGKLERILISKLTNQYSISTIEDDSSKQSM

SEQ ID NO: 102 - protein, 1307 aa, Unknown
  Synthetic
MTQFEGFTNLYQVSKTLRFELIPQGKTLKHIQEQGFIEEDKARNDHYKELKPIIDRIYKTYADQCLQLVQLDWENLSAAIDSYRKEKTEETRNALIEEQATYRNAIHDYFIGRTDNLTDAINKRHAEIYKGLFKAELFNGKVLKQLGTVTTTEHENALLRSFDKFTTYFSGFYENRKNVFSAEDISTAIPHRIVQDNFPKFKENCHIFTRLITAVPSLREHFENVKKAIGIFVSTSIEEVFSFPFYNQLLTQTQIDLYNQLLGGISREAGTEKIKGLNEVLNLAIQKNDETAHIIASLPHRFIPLFKQILSDRNTLSFILEEFKSDEEVIQSFCKYKTLLRNENVLETAEALFNELNSIDLTHIFISHKKLETISSALCDHWDTLRNALYERRISELTGKITKSAKEKVQRSLKHEDINLQEIISAAGKELSEAFKQKTSEILSHAHAALDQPLPTTLKKQEEKEILKSQLDSLLGLYHLLDWFAVDESNEVDPEFSARLTGIKLEMEPSLSFYNKARNYATKKPYSVEKFKLNFQMPTLASGWDVNKEKNNGAILFVKNGLYYLGIMPKQKGRYKALSFEPTEKTSEGFDKMYYDYFPDAAKMIPKCSTQLKAVTAHFQTHTTPILLSNNFIEPLEITKEIYDLNNPEKEPKKFQTAYAKKTGDQKGYREALCKWIDFTRDFLSKYTKTTSIDLSSLRPSSQYKDLGEYYAELNPLLYHISFQRIAEKEIMDAVETGKLYLFQIYNKDFAKGHHGKPNLHTLYWTGLFSPENLAKTSIKLNGQAELFYRPKSRMKRMAHRLGEKMLNKKLKDQKTPIPDTLYQELYDYVNHRLSHDLSDEARALLPNVITKEVSHEIIKDRRFTSDKFFFHVPITLNYQAANSPSKFNQRVNAYLKEHPETPIIGIDRGERNLIYITVIDSTGKILEQRSLNTIQQFDYQKKLDNREKERVAARQAWSVVGTIKDLKQGYLSQVIHEIVDLMIHYQAVVVLENLNFGFKSKRTGIAEKAVYQQFEKMLIDKLNCLVLKDYPAEKVGGVLNPYQLTDQFTSFAKMGTQSGFLFYVPAPYTSKIDPLTGFVDPFVWKTIKNHESRKHFLEGFDFLHYDVKTGDFILHFKMNRNLSFQRGLPGFMPAWDIVFEKNETQFDAKGTPFIAGKRIVPVIENHRFTGRYRDLYPANELIALLEEKGIVFRDGSNILPKLLENDDSHAIDTMVALIRSVLQMRNSNAATGEDYINSPVRDLNGVCFDSRFQNPEWPMDADANGAYHIALKGQLLLNHLKESKDLKLQNGISNQDWLAYIQELRN

SEQ ID NO: 103 - protein, 1307 aa, Artificial Sequence
  Synthetic
MTQFEGFTNLYQVSKTLRFELIPQGKTLKHIQEQGFIEEDKARNDHYKELKPIIDRIYKTYADQCLQLVQLDWENLSAAIDSYRKEKTEETRNALIEEQATYRNAIHDYFIGRTDNLTDAINKRHAEIYKGLFKAELFNGKVLKQLGTVTTTEHENALLRSFDKFTTYFSGFYENRKNVFSAEDISTAIPHRIVQDNFPKFKENCHIFTRLITAVPSLREHFENVKKAIGIFVSTSIEEVFSFPFYNQLLTQTQIDLYNQLLGGISREAGTEKIKGLNEVLNLAIQKNDETAHIIASLPHRFIPLFKQILSDRNTLSFILEEFKSDEEVIQSFCKYKTLLRNENVLETAEALFNELNSIDLTHIFISHKKLETISSALCDHWDTLRNALYERRISELTGKITKSAKEKVQRSLKHEDINLQEIISAAGKELSEAFKQKTSEILSHAHAALDQPLPTTLKKQEEKEILKSQLDSLLGLYHLLDWFAVDESNEVDPEFSARLTGIKLEMEPSLSFYNKARNYATKKPYSVEKFKLNFQMPTLASGWDVNKEKNNGAILFVKNGLYYLGIMPKQKGRYKALSFEPTEKTSEGFDKMYYDYFPDAAKMIPKCSTQLKAVTAHFQTHTTPILLSNNFIEPLEITKEIYDLNNPEKEPKKFQTAYAKKTGDQKGYREALCKWIDFTRDFLSKYTKTTSIDLSSLRPSSQYKDLGEYYAELNPLLYHISFQRIAEKEIMDAVETGKLYLFQIYNKDFAKGHHGKPNLHTLYWTGLFSPENLAKTSIKLNGQAELFYRPKSRMKRMAHRLGEKMLNKKLKDQKTPIPDTLYQELYDYVNHRLSHDLSDEARALLPNVITKEVSHEIIKDRRFTSDKFFFHVPITLNYQAANSPSKFNQRVNAYLKEHPETPIIGIDRGERNLIYITVIDSTGKILEQRSLNTIQQFDYQKKLDNREKERVAARQAWSVVGTIKDLKQGYLSQVIHEIVDLMIHYQAVVVLENLNFGFKSKRTGIAEKAVYQQFEKMLIDKLNCLVLKDYPAEKVGGVLNPYQLTDQFTSFAKMGTQSGFLFYVPAPYTSKIDPLTGFVDPFVWKTIKNHESRKHFLEGFDFLHYDVKTGDFILHFKMNRNLSFQRGLPGFMPAWDIVFEKNETQFDAKGTPFIAGKRIVPVIENHRFTGRYRDLYPANELIALLEEKGIVFRDGSNILPKLLENDDSHAIDTMVALIRSVLQMANSNAATGEDYINSPVRDLNGVCFDSRFQNPEWPMDADANGAYHIALKGQLLLNHLKESKDLKLQNGISNQDWLAYIQELRN

SEQ ID NO: 104 - protein, 1259 aa, Unknown
  Synthetic
MNYKTGLEDFIGKESLSKTLRNALIPTESTKIHMEEMGVIRDDELRAEKQQELKEIMDDYYRTFIEEKLGQIQGIQWNSLFQKMEETMEDISVRKDLDKIQNEKRKEICCYFTSDKRFKDLFNAKLITDILPNFIKDNKEYTEEEKAEKEQTRVLFQRFATAFTNYFNQRRNNFSEDNISTAISFRIVNENSEIHLQNMRAFQRIEQQYPEEVCGMEEEYKDMLQEWQMKHIYSVDFYDRELTQPGIEYYNGICGKINEHMNQFCQKNRINKNDFRMKKLHKQILCKKSSYYEIPFRFESDQEVYDALNEFIKTMKKKEIIRRCVHLGQECDDYDLGKIYISSNKYEQISNALYGSWDTIRKCIKEEYMDALPGKGEKKEEKAEAAAKKEEYRSIADIDKIISLYGSEMDRTISAKKCITEICDMAGQISIDPLVCNSDIKLLQNKEKTTEIKTILDSFLHVYQWGQTFIVSDIIEKDSYFYSELEDVLEDFEGITTLYNHVRSYVTQKPYSTVKFKLHFGSPTLANGWSQSKEYDNNAILLMRDQKFYLGIFNVRNKPDKQIIKGHEKEEKGDYKKMIYNLLPGPSKMLPKVFITSRSGQETYKPSKHILDGYNEKRHIKSSPKFDLGYCWDLIDYYKECIHKHPDWKNYDFHFSDTKDYEDISGFYREVEMQGYQIKWTYISADEIQKLDEKGQIFLFQIYNKDFSVHSTGKDNLHTMYLKNLFSEENLKDIVLKLNGEAELFFRKASIKTPIVHKKGSVLVNRSYTQTVGNKEIRVSIPEEYYTEIYNYLNHIGKGKLSSEAQRYLDEGKIKSFTATKDIVKNYRYCCDHYFLHLPITINFKAKSDVAVNERTLAYIAKKEDIHIIGIDRGERNLLYISVVDVHGNIREQRSFNIVNGYDYQQKLKDREKSRDAARKNWEEIEKIKELKEGYLSMVIHYIAQLVVKYNAVVAMEDLNYGFKTGRFKVERQVYQKFETMLIEKLHYLVFKDREVCEEGGVLRGYQLTYIPESLKKVGKQCGFIFYVPAGYTSKIDPTTGFVNLFSFKNLTNRESRQDFVGKFDEIRYDRDKKMFEFSFDYNNYIKKGTILASTKWKVYTNGTRLKRIVVNGKYTSQSMEVELTDAMEKMLQRAGIEYHDGKDLKGQIVEKGIEAEIIDIFRLTVQMRNSRSESEDREYDRLISPVLNDKGEFFDTATADKTLPQDADANGAYCIALKGLYEVKQIKENWKENEQFPRNKLVQDNKTWFDFMQKKRYL

SEQ ID NO: 105 - protein, 1306 aa, Unknown
  Synthetic
MAKNFEDFKRLYSLSKTLRFEAKPIGATLDNIVKSGLLDEDEHRAASYVKVKKLIDEYHKVFIDRVLDDGCLPLENKGNNNSLAEYYESYVSRAQDEDAKKKFKEIQQNLRSVIAKKLTEDKAYANLFGNKLIESYKDKEDKKKIIDSDLIQFINTAESTQLDSMSQDEAKELVKEFWGFVTYFYGFFDNRKNMYTAEEKSTGIAYRLVNENLPKFIDNIEAFNRAITRPEIQENMGVLYSDFSEYLNVESIQEMFQLDYYNMLLTQKQIDVYNAIIGGKTDDEHDVKIKGINEYINLYNQQHKDDKLPKLKALFKQILSDRNAISWLPEEFNSDQEVLNAIKDCYERLAENVLGDKVLKSLLGSLADYSLDGIFIRNDLQLTDISQKMFGNWGVIQNAIMQNIKRVAPARKHKESEEDYEKRIAGIFKKADSFSISYINDCLNEADPNNAYFVENYFATFGAVNTPTMQRENLFALVQNAYTEVAALLHSDYPTVKHLAQDKANVSKIKALLDAIKSLQHFVKPLLGKGDESDKDERFYGELASLWAELDTVTPLYNMIRNYMTRKPYSQKKIKLNFENPQLLGGWDANKEKDYATIILRRNGLYYLAIMDKDSRKLLGKAMPSDGECYEKMVYKFFKDVTTMIPKCSTQLKDVQAYFKVNTDDYVLNSKAFNKPLTITKEVFDLNNVLYGKYKKFQKGYLTATGDNVGYTHAVNVWIKFCMDFLNSYDSTCIYDFSSLKPESYLSLDAFYQDANLLLYKLSFARASVSYINQLVEEGKMYLFQIYNKDFSEYSKGTPNMHTLYWKALFDERNLADVVYKLNGQAEMFYRKKSIENTHPTHPANHPILNKNKDNKKKESLFDYDLIKDRRYTVDKFMFHVPITMNFKSVGSENINQDVKAYLRHADDMHIIGIDRGERHLLYLVVIDLQGNIKEQYSLNEIVNEYNGNTYHTNYHDLLDVREEERLKARQSWQTIENIKELKEGYLSQVIHKITQLMVRYHAIVVLEDLSKGFMRSRQKVEKQVYQKFEKMLIDKLNYLVDKKTDVSTPGGLLNAYQLTCKSDSSQKLGKQSGFLFYIPAWNTSKIDPVTGFVNLLDTHSLNSKEKIKAFFSKFDAIRYNKDKKWFEFNLDYDKFGKKAEDTRTKWTLCTRGMRIDTFRNKEKNSQWDNQEVDLTTEMKSLLEHYYIDIHGNLKDAISAQTDKAFFTGLLHILKLTLQMRNSITGTETDYLVSPVADENGIFYDSRSCGNQLPENADANGAYNIARKGLMLIEQIKNAEDLNNVKFDISNKAWLNFAQQKPYKNG

SEQ ID NO: 106 - protein, 1142 aa, Unknown
  Synthetic
MFSAKLISDILPEFVIHNNNYSASEKEEKTQVIKLFSRFATSFKDYFKNRANCFSANDISSSSCHRIVNDNAEIFFSNALVYRRIVKNLSNDDINKISGDMKDSLKEMSLEEIYSYEKYGEFITQEGISFYNDICGKVNLFMNLYCQKNKENKNLYKLRKLHKQILCIADTSYEVPYKFESDEEVYQSVNGFLDNISSKHIVERLRKIGENYNGYNLDKIYIVSKFYESVSQKTYRDWETINTALEIHYNNILPGNGKSKADKVKKAVKNDLQKSITEINELVSNYKLCPDDNIKAETYIHEISHILNNFEAQELKYNPEIHLVESELKASELKNVLDVIMNAFHWCSVFMTEELVDKDNNFYAELEEIYDEIYPVISLYNLVRNYVTQKPYSTKKIKLNFGIPTLADGWSKSKEYSNNAIILMRDNLYYLGIFNAKNKPDKKIIEGNTSENKGDYKKMIYNLLPGPNKMIPKVFLSSKTGVETYKPSAYILEGYKQNKHLKSSKDFDITFCHDLIDYFKNCIAIHPEWKNFGFDFSDTSTYEDISGFYREVELQGYKIDWTYISEKDIDLLQEKGQLYLFQIYNKDFSKKSSGNDNLHTMYLKNLFSEENLKDIVLKLNGEAEIFFRKSSIKNPIIHKKGSILVNRTYEAEEKDQFGNIQIVRKTIPENIYQELYKYFNDKSDKELSDEAAKLKNVVGHHEAATNIVKDYRYTYDKYFLHMPITINFKANKTSFINDRILQYIAKEKDLHVIGIDRGERNLIYVSVIDTCGNIVEQKSFNIVNGYDYQIKLKQQEGARQIARKEWKEIGKIKEIKEGYLSLVIHEISKMVIKYNAIIAMEDLSYGFKKGRFKVERQVYQKFETMLINKLNYLVFKDISITENGGLLKGYQLTYIPDKLKNVGHQCGCIFYVPAAYTSKIDPTTGFVNIFKFKDLTVDAKREFIKKFDSIRYDSDKNLFCFTFDYNNFITQNTVMSKSSWSVYTYGVRIKRRFVNGRFSNESDTIDITKDMEKTLEMTDINWRDGHDLRQDIIDYEIVQHIFEIFKLTVQMRNSLSELEDRDYDRLISPVLNENNIFYDSAKAGDALPKDADANGAYCIALKGLYEIKQITENWKEDGKFSRDKLKISNKDWFDFIQNKRYL

SEQ ID NO: 107 - protein, 1259 aa, Unknown
  Synthetic
MNYKTGLEDFIGKESLSKTLRNALIPTESTKIHMEEMGVIRDDELRAEKQQELKEIMDDYYRAFIEEKLGQIQGIQWNSLFQKMEETMEDISVRKDLDKIQNEKRKEICCYFTSDKRFKDLFNAKLITDILPNFIKDNKEYTEEEKAEKEQTRVLFQRFATAFTNYFNQRRNNFSEDNISTAISFRIVNENSEIHLQNMRAFQRIEQQYPEEVCGMEEEYKDMLQEWQMKHIYLVDFYDRVLTQPGIEYYNGICGKINEHMNQFCQKNRINKNDFRMKKLHKQILCKKSSYYEIPFRFESDQEVYDALNEFIKTMKEKEIICRCVHLGQKCDDYDLGKIYISSNKYEQISNALYGSWDTIRKCIKEEYMDALPGKGEKKEEKAEAAAKKEEYRSIADIDKIISLYGSEMDRTISAKKCITEICDMAGQISTDPLVCNSDIKLLQNKEKTTEIKTILDSFLHVYQWGQTFIVSDIIEKDSYFYSELEDVLEDFEGITTLYNHVRSYVTQKPYSTVKFKLHFGSPTLANGWSQSKEYDNNAILLMRDQKFYLGIFNVRNKPDKQIIKGHEKEEKGDYKKMIYNLLPGPSKMLPKVFITSRSGQETYKPSKHILDGYNEKRHIKSSPKFDLGYCWDLIDYYKECIHKHPDWKNYDFHFSDTKDYEDISGFYREVEMQGYQIKWTYISADEIQKLDEKGQIFLFQIYNKDFSVHSTGKDNLHTMYLKNLFSEENLKDIVLKLNGEAELFFRKASIKTPVVHKKGSVLVNRSYTQTVGDKEIRVSIPEEYYTEIYNYLNHIGRGKLSTEAQRYLEERKIKSFTATKDIVKNYRYCCDHYFLHLPITINFKAKSDIAVNERTLAYIAKKEDIHIIGIDRGERNLLYISVVDVHGNIREQRSFNIVNGYDYQQKLKDREKSRDAARKNWEEIEKIKELKEGYLSMVIHYIAQLVVKYNAVVAMEDLNYGFKTGRFKVERQVYQKFETMLIEKLHYLVFKDREVCEEGGVLRGYQLTYIPESLKKVGKQCGFIFYVPAGYTSKIDPTTGFVNLFSFKNLTNRESRQDFVGKFDEIRYDRDKKMFEFSFDYNNYIKKGTMLASTKWKVYTNGTRLKRIVVNGKYTSQSMEVELTDAMEKMLQRAGIEYHDGKDLKGQIVEKGIEAEIIDIFRLTVQMRNSRSESEDREYDRLISPVLNDKGEFFDTATADKTLPQDADANGAYCIALKGLYEVKQIKENWKENEQFPRNKLVQDNKTWFDFMQKKRYL

SEQ ID NO: 108 - protein, 1465 aa, Unknown
  Synthetic
MSEKTTQRAYTLRLNRASGECAVCQNNSCDCWHDALWATHKAVNRGAKAFGDWLLTLRGGLCHTLVEMEVPAKGNNPPQRPTDQERRDRRVLLALSWLSVEDEHGAPKEFIVATGRDSADDRAKKVEEKLREILEKRDFQEHEIDAWLQDCGPSLKAHIREDAVWVNRRALFDAAVERIKTLTWEEAWDFLEPFFGTQYFAGIGDGKDKDDAEGPARQGEKAKDLVQKAGQWLSARFGIGTGADFMSMAEAYEKIAKWASQAQNGDNGKATIEKLACALRPSEPPTLDTVLKCISGPGHKSATREYLKTLDKKSTVTQEDLNQLRKLADEDARNCRKKVGKKGKKPWADEVLKDVENSCELTYLQDNSPARHREFSVMLDHAARRVSMAHSWIKKAEQRRRQFESDAQKLKNLQERAPSAVEWLDRFCESRSMTTGANTGSGYRIRKRAIEGWSYVVQAWAEASCDTEDKRIAAARKVQADPEIEKFGDIQLFEALAADEAICVWRDQEGTQNPSILIDYVTGKTAEHNQKRFKVPAYRHPDELRHPVFCDFGNSRWSIQFAIHKEIRDRDKGAKQDTRQLQNRHGLKMRLWNGRSMTDVNLHWSSKRLTADLALDQNPNPNPTEVTRADRLGRAASSAFDHVKIKNVFNEKEWNGRLQAPRAELDRIAKLEEQGKTEQAEKLRKRLRWYVSFSPCLSPSGPFIVYAGQHNIQPKRSGQYAPHAQANKGRARLAQLILSRLPDLRILSVDLGHRFAAACAVWETLSSDAFRREIQGLNVLAGGSGEGDLFLHVEMTGDDGKRRTVVYRRIGPDQLLDNTPHPAPWARLDRQFLIKLQGEDEGVREASNEELWTVHKLEVEVGRTVPLIDRMVRSGFGKTEKQKERLKKLRELGWISAMPNEPSAETDEKEGEIRSISRSVDELMSSALGTLRLALKRHGNRARIAFAMTADYKPMPGGQKYYFHEAKEASKNDDETKRRDNQIEFLQDALSLWHDLFSSPDWEDNEAKKLWQNHIATLPNYQTPEEISAELKRVERNKKRKENRDKLRTAAKALAENDQLRQHLHDTWKERWESDDQQWKERLRSLKDWIFPRGKAEDNPSIRHVGGLSITRINTISGLYQILKAFKMRPEPDDLRKNIPQKGDDELENFNRRLLEARDRLREQRVKQLASRIIEAALGVGRIKIPKNGKLPKRPRTTVDTPCHAVVIESLKTYRPDDLRTRRENRQLMQWSSAKVRKYLKEGCELYGLHFLEVPANYTSRQCSRTGLPGIRCDDVPTGDFLKAPWWRRAINTAREKNGGDAKDRFLVDLYDHLNNLQSKGEALPATVRVPRQGGNLFIAGAQLDDTNKERRAIQADLNAAANIGLRALLDPDWRGRWWYVPCKDGTSEPALDRIEGSTAFNDVRSLPTGDNSSRRAPREIENLWRDPSGDSLESGTWSPTRAYWDTVQSRVIELLRRHAGLPTS

SEQ ID NO: 109 - protein, 1090 aa, Unknown
  Synthetic
MSIRSFKLKLKTKSGVNAEQLRRGLWRTHQLINDGIAYYMNWLVLLRQEDLFIRNKETNEIEKRSKEEIQAVLLERVHKQQQRNQWSGEVDEQTLLQALRQLYEEIVPSVIGKSGNASLKARFFLGPLVDPNNKTTKDVSKSGPTPKWKKMKDAGDPNWVQEYEKYMAERQTLVRLEEMGLIPLFPMYTDEVGDIHWLPQASGYTRTWDRDMFQQAIERLLSWESWNRRVRERRAQFEKKTHDFASRFSESDVQWMNKLREYEAQQEKSLEENAFAPNEPYALTKKALRGWERVYHSWMRLDSAASEEAYWQEVATCQTAMRGEFGDPAIYQFLAQKENHDIWRGYPERVIDFAELNHLQRELRRAKEDATFTLPDSVDHPLWVRYEAPGGTNIHGYDLVQDTKRNLTLILDKFILPDENGSWHEVKKVPFSLAKSKQFHRQVWLQEEQKQKKREVVFYDYSTNLPHLGTLAGAKLQWDRNFLNKRTQQQIEETGEIGKVFFNISVDVRPAVEVKNGRLQNGLGKALTVLTHPDGTKIVTGWKAEQLEKWVGESGRVSSLGLDSLSEGLRVMSIDLGQRTSATVSVFEITKEAPDNPYKFFYQLEGTEMFAVHQRSFLLALPGENPPQKIKQMREIRWKERNRIKQQVDQLSAILRLHKKVNEDERIQAIDKLLQKVASWQLNEEIATAWNQALSQLYSKAKENDLQWNQAIKNAHHQLEPVVGKQISLWRKDLSTGRQGIAGLSLWSIEELEATKKLLTRWSKRSREPGVVKRIERFETFAKQIQHHINQVKENRLKQLANLIVMTALGYKYDQEQKKWIEVYPACQVVLFENLRSYRFSFERSRRENKKLMEWSHRSIPKLVQMQGELFGLQVADVYAAYSSRYHGRTGAPGIRCHALTEADLRNETNIIHELIEAGFIKEEHRPYLQQGDLVPWSGGELFATLQKPYDNPRILTLHADINAAQNIQKRFWHPSMWFRVNCESVMEGEIVTYVPKNKTVHKKQGKTFRFVKVEGSDVYEWAKWSKNRNKNTFSSITERKPPSSMILFRDPSGTFFKEQEWVEQKTFWGKVQSMIQAYMKKTIVQRMEE

SEQ ID NO: 110 - protein, 1194 aa, Unknown
  Synthetic
MVLGRKDDTAELRRALWTTHEHVNLAVAEVERVLLRCRGRSYWTLDRRGDPVHVPESQVAEDALAMAREAQRRNGWPVVGEDEEILLALRYLYEQIVPSCLLDDLGKPLKGDAQKIGTNYAGPLFDSDTCRRDEGKDVACCGPFHEVAGKYLGALPEWATPISKQEFDGKDASHLRFKATGGDDAFFRVSIEKANAWYEDPANQDALKNKAYNKDDWKKEKDKGISSWAVKYIQKQLQLGQDPRTEVRRKLWLELGLLPLFIPVFDKTMVGNLWNRLAVRLALAHLLSWESWNHRAVQDQALARAKRDELAALFLGMEDGFAGLREYELRRNESIKQHAFEPVDRPYVVSGRALRSWTRVREEWLRHGDTQESRKNICNRLQDRLRGKFGDPDVFHWLAEDGQEALWKERDCVTSFSLLNDADGLLEKRKGYALMTFADARLHPRWAMYEAPGGSNLRTYQIRKTENGLWADVVLLSPRNESAAVEEKTFNVRLAPSGQLSNVSFDQIQKGSKMVGRCRYQSANQQFEGLLGGAEILFDRKRIANEQHGATDLASKPGHVWFKLTLDVRPQAPQGWLDGKGRPALPPEAKHFKTALSNKSKFADQVRPGLRVLSVDLGVRSFAACSVFELVRGGPDQGTYFPAADGRTVDDPEKLWAKHERSFKITLPGENPSRKEEIARRAAMEELRSLNGDIRRLKAILRLSVLQEDDPRTEHLRLFMEAIVDDPAKSALNAELFKGFGDDRFRSTPDLWKQHCHFFHDKAEKVVAERFSRWRTETRPKSSSWQDWRERRGYAGGKSYWAVTYLEAVRGLILRWNMRGRTYGEVNRQDKKQFGTVASALLHHINQLKEDRIKTGADMIIQAARGFVPRKNGAGWVQVHEPCRLILFEDLARYRFRTDRSRRENSRLMRWSHREIVNEVGMQGELYGLHVDTTEAGFSSRYLASSGAPGVRCRHLVEEDFHDGLPGMHLVGELDWLLPKDKDRTANEARRLLGGMVRPGMLVPWDGGELFATLNAASQLHVIHADINAAQNLQRRFWGRCGEAIRIVCNQLSVDGSTRYEMAKAPKARLLGALQQLKNGDAPFHLTSIPNSQKPENSYVMTPTNAGKKYRAGPGEKSSGEEDELALDIVEQAEELAQGRKTFFRDPSGVFFAPDRWLPSEIYWSRIRRRIWQVTLERNSSGRQERAEMDEMPY

SEQ ID NO: 111 - protein, 1300 aa, Unknown
  Synthetic
MSIYQEFVNKYSLSKTLRFELIPQGKTLENIKARGLILDDEKRAKDYKKAKQIIDKYHQFFIEEILSSVCISEDLLQNYSDVYFKLKKSDDDNLQKDFKSAKDTIKKQISEYIKDSEKFKNLFNQNLIDAKKGQESDLILWLKQSKDNGIELFKANSDITDIDEALEIIKSFKGWTTYFKGFHENRKNVYSSNDIPTSIIYRIVDDNLPKFLENKAKYESLKDKAPEAINYEQIKKDLAEELTFDIDYKTSEVNQRVFSLDEVFEIANFNNYLNQSGITKFNTIIGGKFVNGENTKRKGINEYINLYSQQINDKTLKKYKMSVLFKQILSDTESKSFVIDKLEDDSDVVTTMQSFYEQIAAFKTVEEKSIKETLSLLFDDLKAQKLDLSKIYFKNDKSLTDLSQQVFDDYSVIGTAVLEYITQQIAPKNLDNPSKKEQELIAKKTEKAKYLSLETIKLALEEFNKHRDIDKQCRFEEILANFAAIPMIFDEIAQNKDNLAQISIKYQNQGKKDLLQASAEDDVKAIKDLLDQTNNLLHKLKIFHISQSEDKANILDKDEHFYLVFEECYFELANIVPLYNKIRNYITQKPYSDEKFKLNFENSTLANGWDKNKEPDNTAILFIKDDKYYLGVMNKKNNKIFDDKAIKENKGEGYKKIVYKLLPGANKMLPKVFFSAKSIKFYNPSEDILRIRNHSTHTKNGSPQKGYEKFEFNIEDCRKFIDFYKQSISKHPEWKDFGFRFSDTQRYNSIDEFYREVENQGYKLTFENISESYIDSVVNQGKLYLFQIYNKDFSAYSKGRPNLHTLYWKALFDERNLQDVVYKLNGEAELFYRKQSIPKKITHPAKEAIANKNKDNPKKESVFEYDLIKDKRFTEDKFFFHCPITINFKSSGANKFNDEINLLLKEKANDVHILSIDRGERHLAYYTLVDGKGNIIKQDTFNIIGNDRMKTNYHDKLAAIEKDRDSARKDWKKINNIKEMKEGYLSQVVHEIAKLVIEYNAIVVFEDLNFGFKRGRFKVEKQVYQKLEKMLIEKLNYLVFKDNEFDKTGGVLRAYQLTAPFETFKKMGKQTGIIYYVPAGFTSKICPVTGFVNQLYPKYESVSKSQEFFSKFDKICYNLDKGYFEFSFDYKNFGDKAAKGKWTIASFGSRLINFRNSDKNHNWDTREVYPTKELEKLLKDYSIEYGHGECIKAAICGESDKKFFAKLTSVLNTILQMRNSKTGTELDYLISPVADVNGNFFDSRQAPKNMPQDADANGAYHIGLKGLMLLGRIKNNQEGKKLNLVIKNEEYFEFVQNRNN

SEQ ID NO: 112 - protein, 887 aa, Unknown
  Synthetic
MTVIDLDSTTTADELTSGHTYDISVTLTGVYDNTDEQHPRMSLAFEQDNGERRYITLWKNTTPKDVFTYDYATGSTYIFTNIDYEVKDGYENLTATYQTTVENATAQEVGTTDEDETFAGGEPLDHHLDDALNETPDDAETESDSGHVMTSFASRDQLPEWTLHTYTLTATDGAKTDTEYARRTLAYTVRQELYTDHDAAPVATDGLMLLTPEPLGETPLDLDCGVRVEADETRTLDYTTAKDRLLARELVEEGLKRSLWDDYLVRGIDEVLSKEPVLTCDEFDLHERYDLSVEVGHSGRAYLHINFRHRFVPKLTLADIDDDNIYPGLRVKTTYRPRRGHIVWGLRDECATDSLNTLGNQSVVAYHRNNQTPINTDLLDAIEAADRRVVETRRQGHGDDAVSFPQELLAVEPNTHQIKQFASDGFHQQARSKTRLSASRCSEKAQAFAERLDPVRLNGSTVEFSSEFFTGNNEQQLRLLYENGESVLTFRDGARGAHPDETFSKGIVNPPESFEVAVVLPEQQADTCKAQWDTMADLLNQAGAPPTRSETVQYDAFSSPESISLNVAGAIDPSEVDAAFVVLPPDQEGFADLASPTETYDELKKALANMGIYSQMAYFDRFRDAKIFYTRNVALGLLAAAGGVAFTTEHAMPGDADMFIGIDVSRSYPEDGASGQINIAATATAVYKDGTILGHSSTRPQLGEKLQSTDVRDIMKNAILGYQQVTGESPTHIVIHRDGFMNEDLDPATEFLNEQGVEYDIVEIRKQPQTRLLAVSDVQYDTPVKSIAAINQNEPRATVATFGAPEYLATRDGGGLPRPIQIERVAGETDIETLTRQVYLLSQSHIQVHNSTARLPITTAYADQASTHATKGYLVQTGAFESNVGFL

SEQ ID NO: 113 - protein, 1387 aa, Artificial Sequence
  Synthetic
DYKVYDVRKMIAKSEQEIGKATAKYFFYSNIMNFFKTEITLANGEIRKRPLIETNGETGEIVWDKGRDFATVRKVLSMPQVNIVKKTEVQTGGFSKESILPKRNSDKLIARKKDWDPKKYGGFDSPTVAYSVLVVAKVEKGKSKKLKSVKELLGITIMERSSFEKNPIDFLEAKGYKEVKKDLIIKLPKYSLFELENGRKRMLASAGELQKGNELALPSKYVNFLYLASHYEKLKGSPEDNEQKQLFVEQHKHYLDEIIEQISEFSKRVILADANLDKVLSAYNKHRDKPIREQAENIIHLFTLTNLGAPAAFKYFDTTIDRKRYTSTKEVLDATLIHQSITGLYETRIDLSQLGGDGGSGGSGGSGGSGGSGGSGGDKKYSIGLAIGTNSVGWAVITDEYKVPSKKFKVLGNTDRHSIKKNLIGALLFDSGETAEATRLKRTARRRYTRRKNRICYLQEIFSNEMAKVDDSFFHRLEESFLVEEDKKHERHPIFGNIVDEVAYHEKYPTIYHLRKKLVDSTDKADLRLIYLALAHMIKFRGHFLIEGDLNPDNSDVDKLFIQLVQTYNQLFEENPINASGVDAKAILSARLSKSRRLENLIAQLPGEKKNGLFGNLIALSLGLTPNFKSNFDLAEDAKLQLSKDTYDDDLDNLLAQIGDQYADLFLAAKNLSDAILLSDILRVNTEITKAPLSASMIKRYDEHHQDLTLLKALVRQQLPEKYKEIFFDQSKNGYAGYIDGGASQEEFYKFIKPILEKMDGTEELLVKLNREDLLRKQRTFDNGSIPHQIHLGELHAILRRQEDFYPFLKDNREKIEKILTFRIPYYVGPLARGNSRFAWMTRKSEETITPWNFEEVVDKGASAQSFIERMTNFDKNLPNEKVLPKHSLLYEYFTVYNELTKVKYVTEGMRKPAFLSGEQKKAIVDLLFKTNRKVTVKQLKEDYFKKIECFDSVEISGVEDRFNASLGTYHDLLKIIKDKDFLDNEENEDILEDIVLTLTLFEDREMIEERLKTYAHLFDDKVMKQLKRRRYTGWGRLSRKLINGIRDKQSGKTILDFLKSDGFANRNFMQLIHDDSLTFKEDIQKAQVSGQGDSLHEHIANLAGSPAIKKGILQTVKVVDELVKVMGRHKPENIVIEMARENQTTQKGQKNSRERMKRIEEGIKELGSQILKEHPVENTQLQNEKLYLYYLQNGRDMYVDQELDINRLSDYDVDHIVPQSFLKDDSIDNKVLTRSDKNRGKSDNVPSEEVVKKMKNYWRQLLNAKLITQRKFDNLTKAERGGLSELDKAGFIKRQLVETRQITKHVAQILDSRMNTKYDENDKLIREVKVITLKSKLVSDFRKDFQFYKVREINNYHHAHDAYLNAVVGTALIKKYPKLESEFVYG

SEQ ID NO: 114 - protein, 1388 aa, Artificial Sequence
  Synthetic
EIGKATAKYFFYSNIMNFFKTEITLANGEIRKRPLIETNGETGEIVWDKGRDFATVRKVLSMPQVNIVKKTEVQTGGFSKESILPKRNSDKLIARKKDWDPKKYGGFDSPTVAYSVLVVAKVEKGKSKKLKSVKELLGITIMERSSFEKNPIDFLEAKGYKEVKKDLIIKLPKYSLFELENGRKRMLASAGELQKGNELALPSKYVNFLYLASHYEKLKGSPEDNEQKQLFVEQHKHYLDEIIEQISEFSKRVILADANLDKVLSAYNKHRDKPIREQAENIIHLFTLTNLGAPAAFKYFDTTIDRKRYTSTKEVLDATLIHQSITGLYETRIDLSQLGGDGGSGGSGGSGGSGGSGGSGGMDKKYSIGLAIGTNSVGWAVITDEYKVPSKKFKVLGNTDRHSIKKNLIGALLFDSGETAEATRLKRTARRRYTRRKNRICYLQEIFSNEMAKVDDSFFHRLEESFLVEEDKKHERHPIFGNIVDEVAYHEKYPTIYHLRKKLVDSTDKADLRLIYLALAHMIKFRGHFLIEGDLNPDNSDVDKLFIQLVQTYNQLFEENPINASGVDAKAILSARLSKSRRLENLIAQLPGEKKNGLFGNLIALSLGLTPNFKSNFDLAEDAKLQLSKDTYDDDLDNLLAQIGDQYADLFLAAKNLSDAILLSDILRVNTEITKAPLSASMIKRYDEHHQDLTLLKALVRQQLPEKYKEIFFDQSKNGYAGYIDGGASQEEFYKFIKPILEKMDGTEELLVKLNREDLLRKQRTFDNGSIPHQIHLGELHAILRRQEDFYPFLKDNREKIEKILTFRIPYYVGPLARGNSRFAWMTRKSEETITPWNFEEVVDKGASAQSFIERMTNFDKNLPNEKVLPKHSLLYEYFTVYNELTKVKYVTEGMRKPAFLSGEQKKAIVDLLFKTNRKVTVKQLKEDYFKKIECFDSVEISGVEDRFNASLGTYHDLLKIIKDKDFLDNEENEDILEDIVLTLTLFEDREMIEERLKTYAHLFDDKVMKQLKRRRYTGWGRLSRKLINGIRDKQSGKTILDFLKSDGFANRNFMQLIHDDSLTFKEDIQKAQVSGQGDSLHEHIANLAGSPAIKKGILQTVKVVDELVKVMGRHKPENIVIEMARENQTTQKGQKNSRERMKRIEEGIKELGSQILKEHPVENTQLQNEKLYLYYLQNGRDMYVDQELDINRLSDYDVDHIVPQSFLKDDSIDNKVLTRSDKNRGKSDNVPSEEVVKKMKNYWRQLLNAKLITQRKFDNLTKAERGGLSELDKAGFIKRQLVETRQITKHVAQILDSRMNTKYDENDKLIREVKVITLKSKLVSDFRKDFQFYKVREINNYHHAHDAYLNAVVGTALIKKYPKLESEFVYGDYKVYDVRKMIAKSEQ

SEQ ID NO: 115 - protein, 1387 aa, Artificial Sequence
  Synthetic
NIMNFFKTEITLANGEIRKRPLIETNGETGEIVWDKGRDFATVRKVLSMPQVNIVKKTEVQTGGFSKESILPKRNSDKLIARKKDWDPKKYGGFDSPTVAYSVLVVAKVEKGKSKKLKSVKELLGITIMERSSFEKNPIDFLEAKGYKEVKKDLIIKLPKYSLFELENGRKRMLASAGELQKGNELALPSKYVNFLYLASHYEKLKGSPEDNEQKQLFVEQHKHYLDEIIEQISEFSKRVILADANLDKVLSAYNKHRDKPIREQAENIIHLFTLTNLGAPAAFKYFDTTIDRKRYTSTKEVLDATLIHQSITGLYETRIDLSQLGGDGGSGGSGGSGGSGGSGGSGGDKKYSIGLAIGTNSVGWAVITDEYKVPSKKFKVLGNTDRHSIKKNLIGALLFDSGETAEATRLKRTARRRYTRRKNRICYLQEIFSNEMAKVDDSFFHRLEESFLVEEDKKHERHPIFGNIVDEVAYHEKYPTIYHLRKKLVDSTDKADLRLIYLALAHMIKFRGHFLIEGDLNPDNSDVDKLFIQLVQTYNQLFEENPINASGVDAKAILSARLSKSRRLENLIAQLPGEKKNGLFGNLIALSLGLTPNFKSNFDLAEDAKLQLSKDTYDDDLDNLLAQIGDQYADLFLAAKNLSDAILLSDILRVNTEITKAPLSASMIKRYDEHHQDLTLLKALVRQQLPEKYKEIFFDQSKNGYAGYIDGGASQEEFYKFIKPILEKMDGTEELLVKLNREDLLRKQRTFDNGSIPHQIHLGELHAILRRQEDFYPFLKDNREKIEKILTFRIPYYVGPLARGNSRFAWMTRKSEETITPWNFEEVVDKGASAQSFIERMTNFDKNLPNEKVLPKHSLLYEYFTVYNELTKVKYVTEGMRKPAFLSGEQKKAIVDLLFKTNRKVTVKQLKEDYFKKIECFDSVEISGVEDRFNASLGTYHDLLKIIKDKDFLDNEENEDILEDIVLTLTLFEDREMIEERLKTYAHLFDDKVMKQLKRRRYTGWGRLSRKLINGIRDKQSGKTILDFLKSDGFANRNFMQLIHDDSLTFKEDIQKAQVSGQGDSLHEHIANLAGSPAIKKGILQTVKVVDELVKVMGRHKPENIVIEMARENQTTQKGQKNSRERMKRIEEGIKELGSQILKEHPVENTQLQNEKLYLYYLQNGRDMYVDQELDINRLSDYDVDHIVPQSFLKDDSIDNKVLTRSDKNRGKSDNVPSEEVVKKMKNYWRQLLNAKLITQRKFDNLTKAERGGLSELDKAGFIKRQLVETRQITKHVAQILDSRMNTKYDENDKLIREVKVITLKSKLVSDFRKDFQFYKVREINNYHHAHDAYLNAVVGTALIKKYPKLESEFVYGDYKVYDVRKMIAKSEQEIGKATAKYFFYS

SEQ ID NO: 116 - protein, 1388 aa, Artificial Sequence
  Synthetic
PEDNEQKQLFVEQHKHYLDEIIEQISEFSKRVILADANLDKVLSAYNKHRDKPIREQAENIIHLFTLTNLGAPAAFKYFDTTIDRKRYTSTKEVLDATLIHQSITGLYETRIDLSQLGGDGGSGGSGGSGGSGGSGGSGGMDKKYSIGLAIGTNSVGWAVITDEYKVPSKKFKVLGNTDRHSIKKNLIGALLFDSGETAEATRLKRTARRRYTRRKNRICYLQEIFSNEMAKVDDSFFHRLEESFLVEEDKKHERHPIFGNIVDEVAYHEKYPTIYHLRKKLVDSTDKADLRLIYLALAHMIKFRGHFLIEGDLNPDNSDVDKLFIQLVQTYNQLFEENPINASGVDAKAILSARLSKSRRLENLIAQLPGEKKNGLFGNLIALSLGLTPNFKSNFDLAEDAKLQLSKDTYDDDLDNLLAQIGDQYADLFLAAKNLSDAILLSDILRVNTEITKAPLSASMIKRYDEHHQDLTLLKALVRQQLPEKYKEIFFDQSKNGYAGYIDGGASQEEFYKFIKPILEKMDGTEELLVKLNREDLLRKQRTFDNGSIPHQIHLGELHAILRRQEDFYPFLKDNREKIEKILTFRIPYYVGPLARGNSRFAWMTRKSEETITPWNFEEVVDKGASAQSFIERMTNFDKNLPNEKVLPKHSLLYEYFTVYNELTKVKYVTEGMRKPAFLSGEQKKAIVDLLFKTNRKVTVKQLKEDYFKKIECFDSVEISGVEDRFNASLGTYHDLLKIIKDKDFLDNEENEDILEDIVLTLTLFEDREMIEERLKTYAHLFDDKVMKQLKRRRYTGWGRLSRKLINGIRDKQSGKTILDFLKSDGFANRNFMQLIHDDSLTFKEDIQKAQVSGQGDSLHEHIANLAGSPAIKKGILQTVKVVDELVKVMGRHKPENIVIEMARENQTTQKGQKNSRERMKRIEEGIKELGSQILKEHPVENTQLQNEKLYLYYLQNGRDMYVDQELDINRLSDYDVDHIVPQSFLKDDSIDNKVLTRSDKNRGKSDNVPSEEVVKKMKNYWRQLLNAKLITQRKFDNLTKAERGGLSELDKAGFIKRQLVETRQITKHVAQILDSRMNTKYDENDKLIREVKVITLKSKLVSDFRKDFQFYKVREINNYHHAHDAYLNAVVGTALIKKYPKLESEFVYGDYKVYDVRKMIAKSEQEIGKATAKYFFYSNIMNFFKTEITLANGEIRKRPLIETNGETGEIVWDKGRDFATVRKVLSMPQVNIVKKTEVQTGGFSKESILPKRNSDKLIARKKDWDPKKYGGFDSPTVAYSVLVVAKVEKGKSKKLKSVKELLGITIMERSSFEKNPIDFLEAKGYKEVKKDLIIKLPKYSLFELENGRKRMLASAGELQKGNELALPSKYVNFLYLASHYEKLKGS

SEQ ID NO: 117 - protein, 1387 aa, Artificial Sequence
  Synthetic
KPIREQAENIIHLFTLTNLGAPAAFKYFDTTIDRKRYTSTKEVLDATLIHQSITGLYETRIDLSQLGGDGGSGGSGGSGGSGGSGGSGGDKKYSIGLAIGTNSVGWAVITDEYKVPSKKFKVLGNTDRHSIKKNLIGALLFDSGETAEATRLKRTARRRYTRRKNRICYLQEIFSNEMAKVDDSFFHRLEESFLVEEDKKHERHPIFGNIVDEVAYHEKYPTIYHLRKKLVDSTDKADLRLIYLALAHMIKFRGHFLIEGDLNPDNSDVDKLFIQLVQTYNQLFEENPINASGVDAKAILSARLSKSRRLENLIAQLPGEKKNGLFGNLIALSLGLTPNFKSNFDLAEDAKLQLSKDTYDDDLDNLLAQIGDQYADLFLAAKNLSDAILLSDILRVNTEITKAPLSASMIKRYDEHHQDLTLLKALVRQQLPEKYKEIFFDQSKNGYAGYIDGGASQEEFYKFIKPILEKMDGTEELLVKLNREDLLRKQRTFDNGSIPHQIHLGELHAILRRQEDFYPFLKDNREKIEKILTFRIPYYVGPLARGNSRFAWMTRKSEETITPWNFEEVVDKGASAQSFIERMTNFDKNLPNEKVLPKHSLLYEYFTVYNELTKVKYVTEGMRKPAFLSGEQKKAIVDLLFKTNRKVTVKQLKEDYFKKIECFDSVEISGVEDRFNASLGTYHDLLKIIKDKDFLDNEENEDILEDIVLTLTLFEDREMIEERLKTYAHLFDDKVMKQLKRRRYTGWGRLSRKLINGIRDKQSGKTILDFLKSDGFANRNFMQLIHDDSLTFKEDIQKAQVSGQGDSLHEHIANLAGSPAIKKGILQTVKVVDELVKVMGRHKPENIVIEMARENQTTQKGQKNSRERMKRIEEGIKELGSQILKEHPVENTQLQNEKLYLYYLQNGRDMYVDQELDINRLSDYDVDHIVPQSFLKDDSIDNKVLTRSDKNRGKSDNVPSEEVVKKMKNYWRQLLNAKLITQRKFDNLTKAERGGLSELDKAGFIKRQLVETRQITKHVAQILDSRMNTKYDENDKLIREVKVITLKSKLVSDFRKDFQFYKVREINNYHHAHDAYLNAVVGTALIKKYPKLESEFVYGDYKVYDVRKMIAKSEQEIGKATAKYFFYSNIMNFFKTEITLANGEIRKRPLIETNGETGEIVWDKGRDFATVRKVLSMPQVNIVKKTEVQTGGFSKESILPKRNSDKLIARKKDWDPKKYGGFDSPTVAYSVLVVAKVEKGKSKKLKSVKELLGITIMERSSFEKNPIDFLEAKGYKEVKKDLIIKLPKYSLFELENGRKRMLASAGELQKGNELALPSKYVNFLYLASHYEKLKGSPEDNEQKQLFVEQHKHYLDEIIEQISEFSKRVILADANLDKVLSAYNKHRD

SEQ ID NO: 118 - protein, 357 aa, Artificial Sequence
  Synthetic
DYKVYDVRKMIAKSEQEIGKATAKYFFYSNIMNFFKTEITLANGEIRKRPLIETNGETGEIVWDKGRDFATVRKVLSMPQVNIVKKTEVQTGGFSKESILPKRNSDKLIARKKDWDPKKYGGFDSPTVAYSVLVVAKVEKGKSKKLKSVKELLGITIMERSSFEKNPIDFLEAKGYKEVKKDLIIKLPKYSLFELENGRKRMLASAGELQKGNELALPSKYVNFLYLASHYEKLKGSPEDNEQKQLFVEQHKHYLDEIIEQISEFSKRVILADANLDKVLSAYNKHRDKPIREQAENIIHLFTLTNLGAPAAFKYFDTTIDRKRYTSTKEVLDATLIHQSITGLYETRIDLSQLGGD

SEQ ID NO: 119 - protein, 341 aa, Artificial Sequence
  Synthetic
EIGKATAKYFFYSNIMNFFKTEITLANGEIRKRPLIETNGETGEIVWDKGRDFATVRKVLSMPQVNIVKKTEVQTGGFSKESILPKRNSDKLIARKKDWDPKKYGGFDSPTVAYSVLVVAKVEKGKSKKLKSVKELLGITIMERSSFEKNPIDFLEAKGYKEVKKDLIIKLPKYSLFELENGRKRMLASAGELQKGNELALPSKYVNFLYLASHYEKLKGSPEDNEQKQLFVEQHKHYLDEIIEQISEFSKRVILADANLDKVLSAYNKHRDKPIREQAENIIHLFTLTNLGAPAAFKYFDTTIDRKRYTSTKEVLDATLIHQSITGLYETRIDLSQLGGD

SEQ ID NO: 120 - protein, 328 aa, Artificial Sequence
  Synthetic
NIMNFFKTEITLANGEIRKRPLIETNGETGEIVWDKGRDFATVRKVLSMPQVNIVKKTEVQTGGFSKESILPKRNSDKLIARKKDWDPKKYGGFDSPTVAYSVLVVAKVEKGKSKKLKSVKELLGITIMERSSFEKNPIDFLEAKGYKEVKKDLIIKLPKYSLFELENGRKRMLASAGELQKGNELALPSKYVNFLYLASHYEKLKGSPEDNEQKQLFVEQHKHYLDEIIEQISEFSKRVILADANLDKVLSAYNKHRDKPIREQAENIIHLFTLTNLGAPAAFKYFDTTIDRKRYTSTKEVLDATLIHQSITGLYETRIDLSQLGGD

SEQ ID NO: 121 - protein, 120 aa, Artificial Sequence
  Synthetic
PEDNEQKQLFVEQHKHYLDEIIEQISEFSKRVILADANLDKVLSAYNKHRDKPIREQAENIIHLFTLTNLGAPAAFKYFDTTIDRKRYTSTKEVLDATLIHQSITGLYETRIDLSQLGGD

SEQ ID NO: 122 - protein, 69 aa, Artificial Sequence
  Synthetic
KPIREQAENIIHLFTLTNLGAPAAFKYFDTTIDRKRYTSTKEVLDATLIHQSITGLYETRIDLSQLGGD

SEQ ID NO: 123 - protein, 1367 aa, Artificial Sequence
  Synthetic
DKKYSIGLDIGTNSVGWAVITDEYKVPSKKFKVLGNTDRHSIKKNLIGALLFDSGETAEATRLKRTARRRYTRRKNRICYLQEIFSNEMAKVDDSFFHRLEESFLVEEDKKHERHPIFGNIVDEVAYHEKYPTIYHLRKKLVDSTDKADLRLIYLALAHMIKFRGHFLIEGDLNPDNSDVDKLFIQLVQTYNQLFEENPINASGVDAKAILSARLSKSRRLENLIAQLPGEKKNGLFGNLIALSLGLTPNFKSNFDLAEDAKLQLSKDTYDDDLDNLLAQIGDQYADLFLAAKNLSDAILLSDILRVNTEITKAPLSASMIKRYDEHHQDLTLLKALVRQQLPEKYKEIFFDQSKNGYAGYIDGGASQEEFYKFIKPILEKMDGTEELLVKLNREDLLRKQRTFDNGSIPHQIHLGELHAILRRQEDFYPFLKDNREKIEKILTFRIPYYVGPLARGNSRFAWMTRKSEETITPWNFEEVVDKGASAQSFIERMTNFDKNLPNEKVLPKHSLLYEYFTVYNELTKVKYVTEGMRKPAFLSGEQKKAIVDLLFKTNRKVTVKQLKEDYFKKIECFDSVEISGVEDRFNASLGTYHDLLKIIKDKDFLDNEENEDILEDIVLTLTLFEDREMIEERLKTYAHLFDDKVMKQLKRRRYTGWGRLSRKLINGIRDKQSGKTILDFLKSDGFANRNFMQLIHDDSLTFKEDIQKAQVSGQGDSLHEHIANLAGSPAIKKGILQTVKVVDELVKVMGRHKPENIVIEMARENQTTQKGQKNSRERMKRIEEGIKELGSQILKEHPVENTQLQNEKLYLYYLQNGRDMYVDQELDINRLSDYDVDAIVPQSFLKDDSIDNKVLTRSDKNRGKSDNVPSEEVVKKMKNYWRQLLNAKLITQRKFDNLTKAERGGLSELDKAGFIKRQLVETRQITKHVAQILDSRMNTKYDENDKLIREVKVITLKSKLVSDFRKDFQFYKVREINNYHHAHDAYLNAVVGTALIKKYPKLESEFVYGDYKVYDVRKMIAKSEQEIGKATAKYFFYSNIMNFFKTEITLANGEIRKRPLIETNGETGEIVWDKGRDFATVRKVLSMPQVNIVKKTEVQTGGFSKESILPKRNSDKLIARKKDWDPKKYGGFVSPTVAYSVLVVAKVEKGKSKKLKSVKELLGITIMERSSFEKNPIDFLEAKGYKEVKKDLIIKLPKYSLFELENGRKRMLASARELQKGNELALPSKYVNFLYLASHYEKLKGSPEDNEQKQLFVEQHKHYLDEIIEQISEFSKRVILADANLDKVLSAYNKHRDKPIREQAENIIHLFTLTNLGAPAAFKYFDTTIDRKQYRSTKEVLDATLIHQSITGLYETRIDLSQLGGD

SEQ ID NO: 124 - protein, 1367 aa, Artificial Sequence
  Synthetic
DKKYSIGLDIGTNSVGWAVITDEYKVPSKKFKVLGNTDRHSIKKNLIGALLFDSGETAEATRLKRTARRRYTRRKNRICYLQEIFSNEMAKVDDSFFHRLEESFLVEEDKKHERHPIFGNIVDEVAYHEKYPTIYHLRKKLVDSTDKADLRLIYLALAHMIKFRGHFLIEGDLNPDNSDVDKLFIQLVQTYNQLFEENPINASGVDAKAILSARLSKSRRLENLIAQLPGEKKNGLFGNLIALSLGLTPNFKSNFDLAEDAKLQLSKDTYDDDLDNLLAQIGDQYADLFLAAKNLSDAILLSDILRVNTEITKAPLSASMIKRYDEHHQDLTLLKALVRQQLPEKYKEIFFDQSKNGYAGYIDGGASQEEFYKFIKPILEKMDGTEELLVKLNREDLLRKQRTFDNGSIPHQIHLGELHAILRRQEDFYPFLKDNREKIEKILTFRIPYYVGPLARGNSRFAWMTRKSEETITPWNFEEVVDKGASAQSFIERMTNFDKNLPNEKVLPKHSLLYEYFTVYNELTKVKYVTEGMRKPAFLSGEQKKAIVDLLFKTNRKVTVKQLKEDYFKKIECFDSVEISGVEDRFNASLGTYHDLLKIIKDKDFLDNEENEDILEDIVLTLTLFEDREMIEERLKTYAHLFDDKVMKQLKRRRYTGWGRLSRKLINGIRDKQSGKTILDFLKSDGFANRNFMQLIHDDSLTFKEDIQKAQVSGQGDSLHEHIANLAGSPAIKKGILQTVKVVDELVKVMGRHKPENIVIEMARENQTTQKGQKNSRERMKRIEEGIKELGSQILKEHPVENTQLQNEKLYLYYLQNGRDMYVDQELDINRLSDYDVDAIVPQSFLKDDSIDNKVLTRSDKNRGKSDNVPSEEVVKKMKNYWRQLLNAKLITQRKFDNLTKAERGGLSELDKAGFIKRQLVETRQITKHVAQILDSRMNTKYDENDKLIREVKVITLKSKLVSDFRKDFQFYKVREINNYHHAHDAYLNAVVGTALIKKYPKLESEFVYGDYKVYDVRKMIAKSEQEIGKATAKYFFYSNIMNFFKTEITLANGEIRKRPLIETNGETGEIVWDKGRDFATVRKVLSMPQVNIVKKTEVQTGGFSKESILPKRNSDKLIARKKDWDPKKYGGFVSPTVAYSVLVVAKVEKGKSKKLKSVKELLGITIMERSSFEKNPIDFLEAKGYKEVKKDLIIKLPKYSLFELENGRKRMLASAGELQKGNELALPSKYVNFLYLASHYEKLKGSPEDNEQKQLFVEQHKHYLDEIIEQISEFSKRVILADANLDKVLSAYNKHRDKPIREQAENIIHLFTLTNLGAPAAFKYFDTTIDRKQYRSTKEVLDATLIHQSITGLYETRIDLSQLGGD

SEQ ID NO: 125 - protein, 1367 aa, Artificial Sequence
  Synthetic
DKKYSIGLDIGTNSVGWAVITDEYKVPSKKFKVLGNTDRHSIKKNLIGALLFDSGETAEATRLKRTARRRYTRRKNRICYLQEIFSNEMAKVDDSFFHRLEESFLVEEDKKHERHPIFGNIVDEVAYHEKYPTIYHLRKKLVDSTDKADLRLIYLALAHMIKFRGHFLIEGDLNPDNSDVDKLFIQLVQTYNQLFEENPINASGVDAKAILSARLSKSRRLENLIAQLPGEKKNGLFGNLIALSLGLTPNFKSNFDLAEDAKLQLSKDTYDDDLDNLLAQIGDQYADLFLAAKNLSDAILLSDILRVNTEITKAPLSASMIKRYDEHHQDLTLLKALVRQQLPEKYKEIFFDQSKNGYAGYIDGGASQEEFYKFIKPILEKMDGTEELLVKLNREDLLRKQRTFDNGSIPHQIHLGELHAILRRQEDFYPFLKDNREKIEKILTFRIPYYVGPLARGNSRFAWMTRKSEETITPWNFEEVVDKGASAQSFIERMTNFDKNLPNEKVLPKHSLLYEYFTVYNELTKVKYVTEGMRKPAFLSGEQKKAIVDLLFKTNRKVTVKQLKEDYFKKIECFDSVEISGVEDRFNASLGTYHDLLKIIKDKDFLDNEENEDILEDIVLTLTLFEDREMIEERLKTYAHLFDDKVMKQLKRRRYTGWGRLSRKLINGIRDKQSGKTILDFLKSDGFANRNFMQLIHDDSLTFKEDIQKAQVSGQGDSLHEHIANLAGSPAIKKGILQTVKVVDELVKVMGRHKPENIVIEMARENQTTQKGQKNSRERMKRIEEGIKELGSQILKEHPVENTQLQNEKLYLYYLQNGRDMYVDQELDINRLSDYDVDAIVPQSFLKDDSIDNKVLTRSDKNRGKSDNVPSEEVVKKMKNYWRQLLNAKLITQRKFDNLTKAERGGLSELDKAGFIKRQLVETRQITKHVAQILDSRMNTKYDENDKLIREVKVITLKSKLVSDFRKDFQFYKVREINNYHHAHDAYLNAVVGTALIKKYPKLESEFVYGDYKVYDVRKMIAKSEQEIGKATAKYFFYSNIMNFFKTEITLANGEIRKRPLIETNGETGEIVWDKGRDFATVRKVLSMPQVNIVKKTEVQTGGFSKESILPKRNSDKLIARKKDWDPKKYGGFVSPTVAYSVLVVAKVEKGKSKKLKSVKELLGITIMERSSFEKNPIDFLEAKGYKEVKKDLIIKLPKYSLFELENGRKRMLASARELQKGNELALPSKYVNFLYLASHYEKLKGSPEDNEQKQLFVEQHKHYLDEIIEQISEFSKRVILADANLDKVLSAYNKHRDKPIREQAENIIHLFTLTNLGAPAAFKYFDTTIDRKEYRSTKEVLDATLIHQSITGLYETRIDLSQLGGD

SEQ ID NO: 126 - protein, 1368 aa, Artificial Sequence
  Synthetic
MDKKYSIGLDIGTNSVGWAVITDEYKVPSKKFKVLGNTDRHSIKKNLIGALLFDSGETAEATRLKRTARRRYTRRKNRICYLQEIFSNEMAKVDDSFFHRLEESFLVEEDKKHERHPIFGNIVDEVAYHEKYPTIYHLRKKLVDSTDKADLRLIYLALAHMIKFRGHFLIEGDLNPDNSDVDKLFIQLVQTYNQLFEENPINASGVDAKAILSARLSKSRRLENLIAQLPGEKKNGLFGNLIALSLGLTPNFKSNFDLAEDAKLQLSKDTYDDDLDNLLAQIGDQYADLFLAAKNLSDAILLSDILRVNTEITKAPLSASMIKRYDEHHQDLTLLKALVRQQLPEKYKEIFFDQSKNGYAGYIDGGASQEEFYKFIKPILEKMDGTEELLVKLNREDLLRKQRTFDNGSIPHQIHLGELHAILRRQEDFYPFLKDNREKIEKILTFRIPYYVGPLARGNSRFAWMTRKSEETITPWNFEEVVDKGASAQSFIERMTNFDKNLPNEKVLPKHSLLYEYFTVYNELTKVKYVTEGMRKPAFLSGEQKKAIVDLLFKTNRKVTVKQLKEDYFKKIECFDSVEISGVEDRFNASLGTYHDLLKIIKDKDFLDNEENEDILEDIVLTLTLFEDREMIEERLKTYAHLFDDKVMKQLKRRRYTGWGRLSRKLINGIRDKQSGKTILDFLKSDGFANRNFMQLIHDDSLTFKEDIQKAQVSGQGDSLHEHIANLAGSPAIKKGILQTVKVVDELVKVMGRHKPENIVIEMARENQTTQKGQKNSRERMKRIEEGIKELGSQILKEHPVENTQLQNEKLYLYYLQNGRDMYVDQELDINRLSDYDVDHIVPQSFLKDDSIDNKVLTRSDKNRGKSDNVPSEEVVKKMKNYWRQLLNAKLITQRKFDNLTKAERGGLSELDKAGFIKRQLVETRQITKHVAQILDSRMNTKYDENDKLIREVKVITLKSKLVSDFRKDFQFYKVREINNYHHAHDAYLNAVVGTALIKKYPKLESEFVYGDYKVYDVRKMIAKSEQEIGKATAKYFFYSNIMNFFKTEITLANGEIRKRPLIETNGETGEIVWDKGRDFATVRKVLSMPQVNIVKKTEVQTGGFSKESIRPKRNSDKLIARKKDWDPKKYGGFVSPTVAYSVLVVAKVEKGKSKKLKSVKELLGITIMERSSFEKNPIDFLEAKGYKEVKKDLIIKLPKYSLFELENGRKRMLASARFLQKGNELALPSKYVNFLYLASHYEKLKGSPEDNEQKQLFVEQHKHYLDEIIEQISEFSKRVILADANLDKVLSAYNKHRDKPIREQAENIIHLFTLTNLGAPRAFKYFDTTIDRKVYRSTKEVLDATLIHQSITGLYETRIDLSQLGGD

SEQ ID NO: 127 - protein, 1367 aa, Artificial Sequence
  Synthetic
DKKYSIGLAIGTNSVGWAVITDEYKVPSKKFKVLGNTDRHSIKKNLIGALLFDSGETAEATRLKRTARRRYTRRKNRICYLQEIFSNEMAKVDDSFFHRLEESFLVEEDKKHERHPIFGNIVDEVAYHEKYPTIYHLRKKLVDSTDKADLRLIYLALAHMIKFRGHFLIEGDLNPDNSDVDKLFIQLVQTYNQLFEENPINASGVDAKAILSARLSKSRRLENLIAQLPGEKKNGLFGNLIALSLGLTPNFKSNFDLAEDAKLQLSKDTYDDDLDNLLAQIGDQYADLFLAAKNLSDAILLSDILRVNTEITKAPLSASMIKRYDEHHQDLTLLKALVRQQLPEKYKEIFFDQSKNGYAGYIDGGASQEEFYKFIKPILEKMDGTEELLVKLNREDLLRKQRTFDNGSIPHQIHLGELHAILRRQEDFYPFLKDNREKIEKILTFRIPYYVGPLARGNSRFAWMTRKSEETITPWNFEEVVDKGASAQSFIERMTNFDKNLPNEKVLPKHSLLYEYFTVYNELTKVKYVTEGMRKPAFLSGEQKKAIVDLLFKTNRKVTVKQLKEDYFKKIECFDSVEISGVEDRFNASLGTYHDLLKIIKDKDFLDNEENEDILEDIVLTLTLFEDREMIEERLKTYAHLFDDKVMKQLKRRRYTGWGRLSRKLINGIRDKQSGKTILDFLKSDGFANRNFMQLIHDDSLTFKEDIQKAQVSGQGDSLHEHIANLAGSPAIKKGILQTVKVVDELVKVMGRHKPENIVIEMARENQTTQKGQKNSRERMKRIEEGIKELGSQILKEHPVENTQLQNEKLYLYYLQNGRDMYVDQELDINRLSDYDVDAIVPQSFLKDDSIDNKVLTRSDKNRGKSDNVPSEEVVKKMKNYWRQLLNAKLITQRKFDNLTKAERGGLSELDKAGFIKRQLVETRQITKHVAQILDSRMNTKYDENDKLIREVKVITLKSKLVSDFRKDFQFYKVREINNYHHAHDAYLNAVVGTALIKKYPKLESEFVYGDYKVYDVRKMIAKSEQEIGKATAKYFFYSNIMNFFKTEITLANGEIRKRPLIETNGETGEIVWDKGRDFATVRKVLSMPQVNIVKKTEVQTGGFSKESILPKRNSDKLIARKKDWDPKKYGGFDSPTVAYSVLVVAKVEKGKSKKLKSVKELLGITIMERSSFEKNPIDFLEAKGYKEVKKDLIIKLPKYSLFELENGRKRMLASAGELQKGNELALPSKYVNFLYLASHYEKLKGSPEDNEQKQLFVEQHKHYLDEIIEQISEFSKRVILADANLDKVLSAYNKHRDKPIREQAENIIHLFTLTNLGAPAAFKYFDTTIDRKRYTSTKEVLDATLIHQSITGLYETRIDLSQLGGD

SEQ ID NO: 128 - protein, 1367 aa, Artificial Sequence
  Synthetic
DKKYSIGLAIGTNSVGWAVITDEYKVPSKKFKVLGNTDRHSIKKNLIGALLFDSGETAEATRLKRTARRRYTRRKNRICYLQEIFSNEMAKVDDSFFHRLEESFLVEEDKKHERHPIFGNIVDEVAYHEKYPTIYHLRKKLVDSTDKADLRLIYLALAHMIKFRGHFLIEGDLNPDNSDVDKLFIQLVQTYNQLFEENPINASGVDAKAILSARLSKSRRLENLIAQLPGEKKNGLFGNLIALSLGLTPNFKSNFDLAEDAKLQLSKDTYDDDLDNLLAQIGDQYADLFLAAKNLSDAILLSDILRVNTEITKAPLSASMIKRYDEHHQDLTLLKALVRQQLPEKYKEIFFDQSKNGYAGYIDGGASQEEFYKFIKPILEKMDGTEELLVKLNREDLLRKQRTFDNGSIPHQIHLGELHAILRRQEDFYPFLKDNREKIEKILTFRIPYYVGPLARGNSRFAWMTRKSEETITPWNFEEVVDKGASAQSFIERMTNFDKNLPNEKVLPKHSLLYEYFTVYNELTKVKYVTEGMRKPAFLSGEQKKAIVDLLFKTNRKVTVKQLKEDYFKKIECFDSVEISGVEDRFNASLGTYHDLLKIIKDKDFLDNEENEDILEDIVLTLTLFEDREMIEERLKTYAHLFDDKVMKQLKRRRYTGWGRLSRKLINGIRDKQSGKTILDFLKSDGFANRNFMQLIHDDSLTFKEDIQKAQVSGQGDSLHEHIANLAGSPAIKKGILQTVKVVDELVKVMGRHKPENIVIEMARENQTTQKGQKNSRERMKRIEEGIKELGSQILKEHPVENTQLQNEKLYLYYLQNGRDMYVDQELDINRLSDYDVDHIVPQSFLKDDSIDNKVLTRSDKNRGKSDNVPSEEVVKKMKNYWRQLLNAKLITQRKFDNLTKAERGGLSELDKAGFIKRQLVETRQITKHVAQILDSRMNTKYDENDKLIREVKVITLKSKLVSDFRKDFQFYKVREINNYHHAHDAYLNAVVGTALIKKYPKLESEFVYGDYKVYDVRKMIAKSEQEIGKATAKYFFYSNIMNFFKTEITLANGEIRKRPLIETNGETGEIVWDKGRDFATVRKVLSMPQVNIVKKTEVQTGGFSKESILPKRNSDKLIARKKDWDPKKYGGFDSPTVAYSVLVVAKVEKGKSKKLKSVKELLGITIMERSSFEKNPIDFLEAKGYKEVKKDLIIKLPKYSLFELENGRKRMLASAGELQKGNELALPSKYVNFLYLASHYEKLKGSPEDNEQKQLFVEQHKHYLDEIIEQISEFSKRVILADANLDKVLSAYNKHRDKPIREQAENIIHLFTLTNLGAPAAFKYFDTTIDRKRYTSTKEVLDATLIHQSITGLYETRIDLSQLGGD

SEQ ID NO: 129 - protein, 1086 aa, Artificial Sequence
  Synthetic
GKRNYILGLAIGITSVGYGIIDYETRDVIDAGVRLFKEANVENNEGRRSKRGARRLKRRRRHRIQRVKKLLFDYNLLTDHSELSGINPYEARVKGLSQKLSEEEFSAALLHLAKRRGVHNVNEVEEDTGNELSTKEQISRNSKALEEKYVAELQLERLKKDGEVRGSINRFKTSDYVKEAKQLLKVQKAYHQLDQSFIDTYIDLLETRRTYYEGPGEGSPFGWKDIKEWYEMLMGHCTYFPEELRSVKYAYNADLYNALNDLNNLVITRDENEKLEYYEKFQIIENVFKQKKKPTLKQIAKEILVNEEDIKGYRVTSTGKPEFTNLKVYHDIKDITARKEIIENAELLDQIAKILTIYQSSEDIQEELTNLNSELTQEEIEQISNLKGYTGTHNLSLKAINLILDELWHTNDNQIAIFNRLKLVPKKVDLSQQKEIPTTLVDDFILSPVVKRSFIQSIKVINAIIKKYGLPNDIIIELAREKNSKDAQKMINEMQKRNRQTNERIEEIIRTTGKENAKYLIEKIKLHDMQEGKCLYSLEAIPLEDLLNNPFNYEVDHIIPRSVSFDNSFNNKVLVKQEENSKKGNRTPFQYLSSSDSKISYETFKKHILNLAKGKGRISKTKKEYLLEERDINRFSVQKDFINRNLVDTRYATRGLMNLLRSYFRVNNLDVKVKSINGGFTSFLRRKWKFKKERNKGYKHHAEDALIIANADFIFKEWKKLDKAKKVMENQMFEEKQAESMPEIETEQEYKEIFITPHQIKHIKDFKDYKYSHRVDKKPNRKLINDTLYSTRKDDKGNTLIVNNLNGLYDKDNDKLKKLINKSPEKLLMYHHDPQTYQKLKLIMEQYGDEKNPLYKYYEETGNYLTKYSKKDNGPVIKKIKYYGNKLNAHLDITDDYPNSRNKVVKLSLKPYRFDVYLDNGVYKFVTVKNLDVIKKENYYEVNSKCYEEAKKLKKISNQAEFIASFYKNDLIKINGELYRVIGVNNDLLNRIEVNMIDITYREYLENMNDKRPPHIIKTIASKTQSIKKYSTDILGNLYEVKSKKHPQIIKKGGSPKKKRKVSSDYKDHDGDYKDHDIDYKDDDDK

SEQ ID NO: 130 - protein, 1425 aa, Unknown
  Synthetic
MYEAARVTDPIEHTSALAGFLVGAVLGIALIAAVAFATFTCGFGVALLAGMAAGIGAQVLLSLGESIGKMFSSQSGAITLGSPNVYVNGKQAAYATLSSVTCSKHNPTPLVAQGSTNIFINGKPAARKDDKITCGAAISDGSHDTYFHGGIQTCLPIDDEVPPWLRTATDWAFALAGLVGGLGGLLKEAGGLSHAVMPCAAKFIGGYVLGEAASRYVIGPAINSAIGGMFGNPVDVTTGRKILPAESETDYVVPSPMPVAIRRFYSSDLDYVGTLGRGWVLPWELRLHARDGRLWYTDAQGRESGFPILKPGQAAFSEADQRYLTCTPDGRYILHDVGETYYDFGRYEPGSGRIGWVRRIEDQAGQWCQFERDSRGRVREIQTCGGLLAVLDYEPEHERLAEVSLVSGDQRRLVVAYGYDENGQMASVTDANGAVVRRFTYADGRMTSHSNALGFTSGYTWKVIDGTPRVVATHTSEGEAWAFEYDIEGRRTHVRHADGRHAQWRYDAQFQIVEYLDFDGRRYGLKYNAAGMPVMLTLPGERTVMFEYDDAGRIVAETDPLGRTTKTRYDGNSMRPVEIILPDGSAWHAEYDRQGRLLVTRDPLDRENRYEYPEALSALPVAHVDALGGRKTFEWNRLGELVAYTDCSGKTTRNFFDAFGLPLARENALGHRVSFDLRPTGETRRVTYPDGSSESYEYDAAGLMIRHIGLGGRMQTLQRNARGQLVEAVDPAGRRTRYHYDAEGRLRELQQAHARYAFAYSAGGRLVSETRPDGVLRRFEYGEAGDLAALEIVGTADDCAPNDRPVRAIRFERDRMGNLCVQHTPTEVTRYERDAGGRLLEVASVPTAAGLALGIAPDTLTFEYDKAGRLSAEHGANGSVQYTLDALDNVLKLALPHEQTLQMLRYGSGHVHQIRHGDQVVSDFERDDLHRELTRTQGPLTERTAYDLLGRKIWQSAGFQPDALARGQGQLWRNYGYDAAGELVESHDSLRGSTQFSYDPAGYLTQRVNTADRQLESFAWDAAGNLLDDAQRSSRGYVEGNRLRMWQNLRFDYDAFGNLATKLRGANQRQQFTYDGQDRLVAVRTQGARGVVETRFAYDPLGRRIAKTDRTLDVRGVTLREETKRFVWEGLRLAQEVRDTGVSSYVYSPDAPYMPAARVDAVKAEALANAAIDKARQATRIYHFHTDVSGAPQEATNEAGDIVWAGQYSAWGKVAPNQHAPARIDQPLRYAGQYADDSTELHYNTFRFYDPDVGRFINQDPIGLMGGLNLYQYAPNSIAWTDWWGLAGSYTLGSYQISAPQLPAYNGQTVGTFYYVNDAGGLESRTFSSGGPTPYPNYANAGHVEGQSALFMRDNGISDGLVFHNNPEGTCGFCVNMTETLLPENSKLTVVPPEGSIPVKRGATGETRTFTGNSKSPKSPVKGGC

SEQ ID NO: 131 - DNA, 4278 bp, Unknown
  Synthetic
gtgtacgaagcggcccgcgtcacggatccgatcgagcacaccagcgcgctggccggcttcctggtgggcgccgtgctcggtatcgccctgattgctgccgtggcgttcgccacgttcacctgcggcttcggcgtggcactgctggccggcatggcggccggcatcggcgcgcaggtgctgttgtcgttaggggaatcgatcgggaagatgttcagttcgcaatccggcgcgatcacgctcggctcgccgaacgtctacgtgaacggcaagcaggccgcctacgccacgctcagcagcgtgacgtgcagcaagcacaacccgacgccgctcgtcgcgcagggctccaccaacatcttcatcaacggcaagccggccgcgcgcaaggacgacaagatcacctgcggcgcggccatctcggacggctcgcacgacacctacttccacggaggcatccagacctgcctgccgatcgacgacgaagtgccgccgtggctgcgcaccgccaccgactgggcgttcgcgctggccgggctggtgggcgggctcggcggcctactcaaggaagcgggcgggctgtcgcacgcggtgatgccgtgcgcggcgaagttcatcggcggctacgtgctcggcgaggcggcgagccgctacgtgatcggcccggccatcaacagcgcgatcggcgggatgttcggcaacccggtagacgtcaccactgggcgcaagatcctccctgccgaatcggaaaccgattacgtcgtgcccagcccgatgccggtggcgatccggcgcttctattcgagcgacctcgattacgtcggcacgcttgggcgcggctgggtgctgccgtgggagctgcgcctgcacgcgcgtgacggtcggctctggtacaccgacgcgcaggggcgcgagagcggcttcccgatcctgaaaccgggccaggccgcgttcagcgaggccgatcagcgctatctgacctgcacgccggatggccgctacatcctccacgacgtcggcgaaacctattacgacttcggccgctacgagccgggctcgggccgcatcggctgggtgcgccggatcgaggatcaggccggccagtggtgccagttcgagcgcgacagccgtggccgcgtgcgtgaaatccagacctgcggcggcttgctggccgtgctcgattacgagccggagcacgagcggctcgccgaggtgtcgctcgtcagcggcgatcagcgccgcctcgtcgtggcctacggctacgacgaaaacggccagatggcctccgtgaccgacgcgaacggcgcggtggtgcgccgcttcacctatgccgacgggcgcatgacgagccattcgaacgcgctcggtttcacgtcgggctatacgtggaaggtcatcgacggcacgccgcgagtggtcgccacccacaccagcgagggcgaggcctgggcgttcgagtacgacatcgaaggccgccgcacccatgtgcggcatgccgacggccgccacgcgcaatggcgctacgacgcgcaattccagatcgtcgagtacctcgatttcgacggccgtcgctacgggctcaagtacaacgctgccggcatgcccgtgatgctgacgctgcccggcgaacgaaccgtgatgttcgagtacgacgacgccggccgcatcgtcgccgaaaccgatcccctcggccgcaccacgaaaacgcgctacgacggcaacagcatgcggcccgtcgagatcatcttgcccgacggcagcgcctggcacgccgaatacgaccggcagggccggctgctcgtcacccgtgatccgctcgaccgggagaatcgctacgaatatccggaggcactgagcgcgctcccggtggcgcatgtcgatgcgctgggcgggcgcaagacgttcgagtggaaccggctcggcgagctggtggcctacaccgattgctcgggcaagaccacgcgcaattttttcgatgcattcggcctgccgctcgcgcgcgagaacgcgctcgggcaccgcgtgtcgttcgatctgcgcccgaccggcgagacgcgccgcgtcacctatcccgacggcagttccgaaagctacgaatacgacgccgccgggctgatgatccggcacatcgggctgggcggccggatgcagacgttgcagcgcaatgcgcgcgggcaactcgtcgaggcggtcgatccggccgggcggcgaacccgctaccactacgacgccgaagggcggctgcgcgagctgcaacaggcccacgcgcgctacgcattcgcgtacagcgcaggcgggcggcttgtcagcgaaacgcggcccgacggcgtgctgcgccgcttcgaatacggcgaggccggcgatctggcggcgctcgagatcgtcggaacggccgatgattgcgctccaaacgatcgcccggttcgcgcgatccgcttcgagcgcgaccggatgggtaacctgtgcgtgcagcacacgcctaccgaggtgacgcgctacgagcgcgacgccggcggccgcctgctcgaagtcgcgagcgtgccgaccgcggccggactggcgctcggcatcgcgcccgacacgctgaccttcgaatacgacaaggccgggcggctgagcgccgaacacggcgcgaacggcagcgtccagtacacgctcgacgcgctcgacaacgtgttgaagctcgccttgccgcacgaacagacgctgcagatgctgcgctacggctcggggcacgtgcaccagattcgccacggcgaccaggtcgtcagcgatttcgagcgcgacgacctgcatcgcgagttgacgcgcacgcagggccccctgaccgagcggaccgcctacgacctgctgggccgcaagatctggcaatcagccggcttccagcccgacgcgcttgcgcgtgggcagggccagctgtggcgcaactacggctacgacgccgccggggaactggtcgagagccacgacagcctgcgcggcagcacgcagttcagctacgatccggccggctatctgacgcagcgcgtgaacaccgccgaccggcagctcgaatcgttcgcctgggacgccgccggcaacctgctcgacgatgcgcaacgcagcagccgcggctatgtcgagggcaaccggctgcgcatgtggcagaacctgcgcttcgactacgacgcgttcggcaatctcgcgaccaagctgcgcggcgcgaatcagcgccagcagttcacgtacgatgggcaggatcggctcgtggccgtgcgcacgcagggcgcgcgcggcgtggtggagacgcgtttcgcctacgatccgctcgggcggcgcatcgccaagaccgataggacactcgacgtgcgcggcgtaacgctgcgcgaggaaacgaagcggttcgtatgggaagggctgcggctcgcgcaggaggtgcgcgacaccggcgtgagcagctacgtgtacagcccggatgcgccttacatgcccgcggcgcgggtcgatgcggtgaaagccgaagcgctcgcaaacgccgcgatcgacaaggccagacaggcgacgcggatctatcactttcataccgatgtgtcgggcgcaccgcaagaagcgacgaacgaggccggcgacattgtttgggccggccaatactcagcctggggcaaggtggcgccgaaccagcatgccccagcccggatcgatcagccgctccgctacgccggacaatatgccgatgacagtaccgagctgcactacaacacgtttcgtttctacgatccggatgtcggccggtttatcaatcaggatccaatcgggttgatgggggggctgaatctttaccaatatgcacccaactcaatcgcgtggaccgactggtgggggctggccggcagctatacgctcggttcctatcaaatttctgctcctcaacttcccgcctacaatgggcagactgttgggaccttctactatgtaaacgacgcgggcgggctcgaatcgaggacattctcttctggagggccgaccccttatccaaattatgccaatgccgggcacgtggaaggccagtccgcactgttcatgagggataacggaatttcagacggactggttttccacaacaaccctgagggtacttgcggattctgcgtcaatatgaccgaaacgcttttgcctgaaaattccaaacttaccgtcgttccgcccgagggctcgattccggtcaagcggggcgcgacgggcgaaacgagaacatttacagggaacagcaagtctccgaagtcccctgtcaaaggaggatgttga

SEQ ID NO: 132 - protein, 1425 aa, Unknown
  Synthetic
MYEAARVTDPIEHTSALTGFLVGAVLGIALIAAVAFATFTCGFGVALLAGMAAGIGAQVLLSLGESIGKMFSSQSGAITLGSPNVYVNGKPTAYAMLSSVTCSKHNPTPLVAQGSTNIFINGKPAARKDDKITCGATISDGSHDTYFHGGTQTCLPIDDEVPPWLRTATDWAFALAGLVGGLGGLLKEAGGLSRAVMPCAAKFIGGYVLGEAASRYVVGPAINSAIGGMFGNPVDVTTGRKILLAESETDYVVPSPMPVAIRRFYSSDLDYVGTLGRGWVLPWELRLHARDGRLWYTDAQGRESGFPMLQPGHAAFSEADQRYLTCTPDGRYILHDLGETYYDFGHYEPGSGRIGWVRRIEDQAGQWCQFERDSRGRVREIQTCGGLLAVLDYEPEHGRLAGVSLVSGDQRRLVVAYGYDEHGQMASVTDANGALVRRFTYADGRMTSHSNALGFTSGYTWQAVGGAPRVVATHTSEGEAWAFEYDIEGRRTHVRHADGRHAQWRYDAQFQIVEYLDFDGRRYGLKYNDAGMPVMLTLPGERTVTFEYDDAGRIVAETDPLGRTTKTRYDGNSRRPVEIIAPDGSAWHAEYDRQGRLLATRDPLDRENRYEYPKALSALPIAHVDALGGRKTFEWNRLGELVAYTDCSGKTTRNFYDAFGLPLARENALGHRVTFDLRPTGEARRVTYPDGSTESYEYDAAGLMIRHVGLGGRTQIALRNARGQIVEAVDPAGRRTCYRYDAEGRLRELQQGHARYAFTYSAGGRLTSETRPDGVRRRFEYGEAGDLAALDIVGAADDATANDRPVRTIRFERDRMGNLCAQHTPTEVTRYTRDTGGRLLEVACVPTAAGLALGIAPDTLTFEYDKAGRLSAEHGANGSVRYTLDALDNVMKLALPHEQTLQMLRYGSGHVHQIRCGDQVVSDFERDDLHRELTRTQGRLTERTAYDLLGRKIWQSAGFQPDALARGQGQVWRNYGYDAAGELAESHDSLRGSTQFSYDPAGYLTQRVNTADRQLESFAWDAAGNLLDDAQRRSRGYVEGNRLRMWQNLRFEYDPFGNLATKLRGANQRQQFTYDGQDRLVAVRTQDARGVVETRFAYDPLGRRIAKTDIVRDARGVALREETKRFVWEGLRLAQEVRDTGVSSYVYSPDAPYTPAARVDAVLAEAMAAAAIEQARQATRIYHFHTDVSGAPQEATNEAGDIVWAGQYSAWGKVAPNQHAPARIDQPLRYAGQYADDSTELHYNTFRFYDPDVGRFINQDPIGLMGGLNLYQYAPNSIAWTDWWGLAGSYTLGSYQISAPQLPAYNGQTVGTFYYVNGAGGLESRTFSSGGPTPYPNYANAGHVEGQSALFMRDNGISDGLVFHNNPEGTCGFCVNMTETLLPENSKLTVVPPEGAIPVKRGATGETRTFTGNSKSPKSPVKGEC

SEQ ID NO: 133 - DNA, 4278 bp, Unknown
  Synthetic
gtgtacgaagcggcccgcgtcaccgacccgatcgaacacaccagcgcgctgaccggctttctggtgggcgccgtgctcggcattgccctgatcgccgcggtggcgttcgccaccttcacctgcggcttcggcgtggcgctgctggccggcatggccgccggcatcggcgcgcaggtgctgttgtcgttaggagaatcgatcgggaagatgttcagttcgcaatccggcgcgatcacgctcggctcgccgaacgtctatgtgaacggcaagccgaccgcctacgccatgctcagcagcgtgacgtgcagcaagcacaacccgacgccgctcgtcgcgcaggggtccaccaacatcttcatcaacggcaagccggccgcccgcaaggacgacaagatcacctgcggcgcgaccatctccgacggctcgcacgacacctatttccacggcggcacccagacctgcctgccgatcgacgacgaagtgccgccgtggctgcgcaccgccaccgactgggcgttcgcgctggccgggctggtgggcgggctcggcggcctgctcaaggaagcgggcgggctgtcgcgcgcggtgatgccgtgcgcggcgaagttcatcggcggctacgtgctcggcgaggcggcgagccgctacgtggtcggcccggccatcaacagcgcgatcggcgggatgttcggcaacccggtggacgtcaccaccgggcgcaagatcctgctggcggaatcggaaaccgattacgtggtgcccagcccgatgccggtggcgatccggcgcttctattcgagcgacctcgactacgtcggcacgctcgggcgcggctgggtgctgccgtgggaactgcggctgcacgcgcgcgacgggcggctctggtacaccgacgcgcaggggcgcgagagcggcttcccgatgctccagccgggccatgccgcgttcagcgaggccgaccagcgctatctgacctgcaccccggatggccgctacatcctgcacgacctcggcgaaacctattacgacttcggccactacgagccgggctcgggccgcatcggctgggtgcgccgcatcgaggatcaggccggccagtggtgccagttcgagcgcgacagccgcggccgcgtgcgcgaaatccagacctgcggcggcttgctggccgtgctcgattacgagccggaacacgggcggctcgccggggtgtcgctcgtcagcggggatcagcgccgcctcgtggtggcttacggctatgacgagcacggccagatggcgtccgtgaccgatgcgaacggcgcgctggtgcgccgcttcacctatgccgacgggcgcatgacgagccattcgaacgcgctcggcttcacgtcgggctatacgtggcaagccgtcggcggcgcgccgcgggtggttgccacccacaccagcgagggcgaggcctgggccttcgagtacgacattgaaggacgccgcacccacgtgcgtcacgccgacggccgccacgcgcaatggcgctacgacgcgcaattccagatcgtcgagtacctcgatttcgacggccggcgctacgggctcaagtacaacgacgccggcatgcccgtgatgctgacgctgcccggcgaacggaccgtgacgttcgagtacgacgatgccggccgcatcgtcgccgaaaccgatccactcggccgcaccacgaaaacgcgctacgacggcaacagcaggcggcccgtcgagatcatcgcgcccgacggcagcgcctggcacgccgaatacgaccggcaaggccggctgctcgccacccgcgatccgctcgaccgggaaaaccgctacgaatacccgaaggcgctcagcgcgctgccgatcgcgcacgtcgatgcgctgggcgggcgcaagacgttcgagtggaaccggctcggcgagctggtggcctataccgattgctcgggcaagaccacacgcaatttttacgacgcattcggtctgccgctcgcgcgcgagaacgcgctcggccaccgcgtgacgttcgacctgcgcccgaccggcgaggcgcggcgcgtcacctatcccgacggcagtacagaaagctacgaatacgacgccgccgggctgatgatccggcacgtcgggctgggcggccggacgcagattgcgctgcgcaacgcgcgtgggcagatcgtggaggcggtcgatccggccggacggcgcacctgctaccgctacgacgccgaggggcggctgcgcgagctgcaacaggggcacgcgcgttacgcgttcacctacagcgcgggcgggcggctcaccagcgaaacccggcccgacggcgtgcggcgccgcttcgaatacggcgaggccggcgatctggcggcgctcgacatcgtcggcgcggccgacgacgccacggcgaacgatcgtccggttcgcaccatccgcttcgagcgcgaccgcatgggcaatctgtgcgcgcagcacacgcccaccgaggtgacgcgctacacgcgcgacaccggcggccgcctgctcgaagtcgcatgcgtgccgaccgcggccgggctggcgctcggcatcgcgcccgacacgctgaccttcgaatacgacaaggccgggcggctgagtgccgaacacggcgcgaacggcagcgtccgatacacgctcgacgcgctcgacaacgtgatgaagctcgccctgccgcacgagcagacgctgcagatgctgcgctacggctcggggcacgtgcatcagatccgctgcggcgaccaggtggtcagcgatttcgagcgcgacgacctgcatcgcgagctgacgcgcactcagggccgcctgaccgagcgtaccgcctacgacctgctgggccgcaagatctggcaatcggccggcttccagcccgacgcgcttgcgcgcgggcagggccaggtgtggcgcaactacggctacgacgccgccggcgaactggccgagagccacgatagcctgcgcggcagcacgcagttcagctacgatccggccggctatctgacgcagcgcgtcaataccgccgaccggcagctcgaatcgttcgcctgggatgccgccggcaacctgctcgacgatgcgcagcgccgcagccgcggttatgtcgagggcaaccggctgcgcatgtggcagaacctgcgcttcgaatacgacccgttcggcaatctcgcgaccaagctgcgcggcgcgaaccagcgccagcagttcacttacgacgggcaggatcggctcgtggcggtgcgcacgcaggacgcgcgcggcgtggtggagacgcgtttcgcctacgatccgctggggcggcgcatcgccaagacggatattgtgcgcgacgcgcgcggcgtagcgctgcgcgaggaaacgaagcggttcgtgtgggaggggctgcggctcgcgcaggaggtgcgcgacacgggcgtgagcagctacgtgtacagcccggacgcgccctatacgcccgcggcgcgcgtggatgccgtgctggccgaggccatggccgccgctgccatcgagcaggccagacaggcgacgcggatctatcactttcataccgatgtgtcgggcgcaccgcaagaagcgacgaacgaggctggcgacattgtttgggccggccaatactcagcctggggcaaggtggcgccgaaccagcatgcccccgcccggatcgatcagccgctccgctacgccggacaatatgccgacgacagtaccgagctgcactacaacacgtttcgtttctacgatccggacgtcggccggtttatcaatcaggatccaatcgggttgatgggggggctgaatctttaccaatatgcacccaactcgatcgcatggaccgactggtgggggctggccggcagctatacgctcggttcctatcaaatttctgcgcctcaacttccggcctacaatggacagactgttgggaccttctactacgtgaacggcgcgggcgggctcgaatcgaggacattctcttccggagggccgaccccttatccaaattatgccaatgccgggcacgtggagggccagtccgcgctgttcatgagggataacggaatttcagacggactggttttccacaacaaccctgagggcacttgcggattctgcgttaatatgaccgaaacgcttttgcctgaaaattccaaacttaccgtcgttccgcccgagggcgcgatcccggtcaagcggggcgcgacgggcgaaacgagaacatttacggggaacagcaagtctccgaagtcccctgtcaaaggagaatgttga

SEQ ID NO: 134 - protein, 2358 aa, Unknown
  Synthetic
MSSSDAGRAFGVPENVLARFTRYPGGARRRAGRTARARRLGIVLSAVLSATLLPAEAWAIAPPAPRTGPTLDALQQEEEVDPDPAAMEELDDWDGGPVEPPADYTPTEVTPPTGGTAPVPLDSAGEELVPAGTLPVRIGQASPTEEDPAPPAPSGTWDVTVEPRATTEAAAVDGAIIKLTPPASGSTPVDVELDYGRFEDLFGTEWSSRLKLTQLPECFLTTPELEECGTPITIPTSNDPATGTVRATVDPADGQPQGLAAQSGGGPAVLAATDSASGAGGTYKATSLSATGSWTAGGSGGGFSWSYPLTIPDTPAGPAPKISLSYSSQSVDGRTSVANGQASWIGDGWDYHPGFVERRYRSCNDDRSGTPNNDNSADKEKSDLCWASDNVVMSLGGSTTELVRDDTTGTWVAQNDTGARIEYKDKDGGALAAQTAGYDGEHWVVTTRDGTRYWFGRNTLPGRGAPTNSALTVPVFGNHTGEPCHAATYAASSCTQAWRWNLDYVEDVHGNAMVVDWKKEQNRYAKNEKFKAAVSYDRDAYPTQILYGLRADDLAGPPAGKVVFHAAPRCLESAATCSEAKFESKNYADKQPWWDTPATLHCKAGDENCYVTSPTFWSRVRLSAIETQGQRTPGSTALSTVDRWTLHQSFPKQRTDTHPPLWLESITRVGFGRPDASGNQSSKALPAVTFLPNKVDMPNRVLKSTTDQTPDFDRLRVEVIRTETGGETHVTYSAPCPVGGTRPTPASNGTRCFPVHWSPDPAAFSDENLDKSGYEPPLEWFNKYVVTKVTEMDLVAEQPSVETVYTYEGDAAWAKNTDEYGKPALRTYDQWRGYASVVTRTGTTANTGAADATEQSQTRTRYFRGMSGDAGRAKVHVTLTDVTGTATTVEDLLPYQGMAAETLTYTKAGGDVAARELAFPYSRKTASRARPGLPALEAYRTGTTRTDSIQHISGDRTRAAQNHTTYDDAYGLPTQTYSLTLSPNDSGTLVAGDERCTVTTYVHNTAAHIIGLPDRVRATTGDCAAAPNATTGQIVSDSRTAYDALGAFGTAPVKGLPVQVDTISGGGTSWITSARTEYDALGRATKVTDAAGNSTTTTYSPATGPAFEVTVTNAAGHATTTTLDPGRGSALTVTDQNGRKTTSTYDELGRATGVWTPSRPVNQDASVRFVYQIEDSKVPAVHTRVLRDAGTYEESIELYDGFLRPRQTQREALGGGRIVTETLYNANGSAKEVRDGYLAEGEPARELFVPLSLDQVPSATRTAYDGLGRPVRTTTLHRGVPRHSATTAYGGDWELSRTGMSPDGTTPLSGSRAVKATTDALGRPARIQHFTTQNVSAESVDTTYTYDPRGPLAQVTDAQQNTWTYTYDARGRKTSSTDPDAGAAYFGYNALDQQVWSKDNQGRLQYTTYDVLGRQTELRDDSASGPLVAKWTFDTLPGAKGHPVASTRYNDGAAFTSEVTGYDTEYRPTGNKVTIPSTPMTTGLAGTYTYASTYTPTGKVQSVDLPATPGGLAAEKVITRYDGEDSPTTMSGLAWYTADTFLGPYGEVLRTASGEAPRRVWTTNVYDEDTRRLTRTTAHRETAPHPVSTTTYGYDTVGNITSIADQQPAGTEEQCFSYDPMGRLVHAWTDGNSAVCPRTSTAPGAGPARADVSAGVDGGGYWHSYAFDAIGNRTKLTVHDRTDAALDDTYTYTYGKTLPGNPQPVQPHTLTQVDAVLNEPGSRVEPRSTYAYDTSGNTTQRVIGGDTQTLAWDRRNKLTSVDTNNDGTPDVKYLYDASGNRLVEDDGTTRTLFLGEAEIVVNTAGQAVDARRYYSSPGAPTTIRTTGGKTTGHKLTVMLSDHHSTATTAVELTDTQPVTRRRFDPYGNPRGTEPTTWPDRRTYLGVGIDDPATGLTHIGAREYDASTGRFISVDPVMDLTDPLQMNGYTYANADPINNSDPTGLLLDARGGGTQKCVGTCVKDVTNRKGIPLPPGEEWKHEGEAQTDFNGDGFITVFPTVNVPAKWKKAKKYTEAFYKAVDTACFYGRESCADPEYPSRAHSINNWKGKACKAVGGKCPERLSWGEGPAFAGGFAIAAEEYAGRGGYRGGGARRGSPCKCFLAGTEVLMADGSTKSIEDIKLGDEVVATDPVTGEAGAHPVSALIATENDKRFNELVIITSEGVERLTATHEHPFWSPSEGEWLEAGELRTGMTLRSDSGETLVVAGNRAFTQRARTYNLTVADLHTYYVLAGQTPVLVHNANCGPHLKDLQKDYPRRTVGILDVGTDQLPMISGPGGQSGLLKNLPGRTKANGEHVETHAAAFLRMNPGVRKAVLYIDYPTGTCGTCRSTLPDMLPEGVQLWVISPRRTEKFTGLPD

SEQ ID NO: 135 - DNA, 7077 bp, Unknown
  Synthetic
atgtcctcgtccgatgcgggacgcgccttcggcgtgcccgaaaacgtcctggcgcgtttcacgcggtatcccggcggggcgcgacgccgtgccgggcgcacggcgcgcgcccggcgcctgggcatcgtgctgtccgccgtcctctcggcgaccctgctgcccgccgaggcatgggccatcgcgcccccggcgccgcgcaccggtccgaccctggacgccctccagcaggaggaggaggtcgatccggacccggccgccatggaagagctggacgactgggacggtgggccggtcgagcccccggccgactacacccccaccgaggtcacgcctcccaccggcggcaccgccccggtgccgctggacagcgcgggcgaggaactggtcccggccgggaccctgcccgtgcgcatcggccaggcgtcccccaccgaggaggacccggcacccccggcacccagcggcacgtgggacgtcaccgtggagccccgcgccaccaccgaggcggccgccgtggacggcgccatcatcaagctcaccccgcccgccagcggctccacaccggtcgacgtggaactcgactacggccggttcgaggacctgttcggcaccgagtggtcctcccggctcaagctgacgcagctcccggagtgcttcctcacgacgcccgagctggaggagtgcggcacccccatcaccatcccgacgagcaacgacccggccaccgggacggtccgggccaccgtcgacccggccgacgggcagccgcagggcctggccgcgcagtcgggcggcggtcccgccgtcctcgccgcgaccgactcggcgtccggcgccggcggcacgtacaaggcgacctccctctcggccaccggctcctggacggccggcggcagcggcggcggcttctcctggtcgtatccgctcaccatcccggacaccccggccggccccgcgccgaagatctccctgtcgtactcctcccagtccgtcgacggccgcacctccgtcgccaacggccaggcgtcgtggataggcgacggctgggactaccaccccggcttcgtcgagcgccgctaccgctcctgcaacgacgaccgctccggcaccccgaacaacgacaacagtgcggacaaggagaagtccgacctgtgctgggcgagcgacaacgtcgtgatgtcgctcggcggctccaccaccgaactcgtccgcgacgacacgaccggcacgtgggtcgcgcagaacgacaccggtgcccggatcgagtacaaggacaaggacggcggagccctggccgcccagaccgccggctacgacggcgagcactgggtcgtcaccacccgcgacggaacccgctactggttcggccgcaacaccctccccggccgcggcgcccccacgaactccgccctcaccgtccccgtcttcggcaaccacaccggcgagccctgccacgccgccacctacgccgcctcctcctgcacccaggcgtggcgctggaacctcgactacgtcgaggacgtccacggcaacgcgatggtcgtcgactggaagaaggagcagaaccggtacgcgaagaacgagaagttcaaggcggctgtctcctacgaccgcgacgcgtatccgacgcagatcctctacggcctgcgcgccgacgacctggcgggcccgcccgccggcaaggtcgtcttccacgccgccccgcgctgcctcgaaagcgcggccacctgctccgaagccaagttcgagtccaagaactacgcggacaagcagccctggtgggacacaccggccaccctgcactgcaaggccggtgacgagaactgctacgtcacctcgccgacgttctggagccgcgtccgcctgtcggcgatcgagacgcagggtcagcgcacgcccggctcgacggcgctgtccacggtcgaccgctggaccctgcaccagtcgttcccgaagcagcgcaccgacacccacccgccgctctggctggagtcgatcacccgcgtgggcttcggccggccggacgcctccggcaaccagtcgagcaaggccctcccggcggtgaccttcctgcccaacaaggtcgacatgccgaaccgcgtgctgaagagcacgacggaccagacgcccgatttcgaccgcctgcgcgtcgaggtcatccgcacggagaccggcggcgagacccatgtgacgtactccgccccctgccccgtcggcggcacccgccccaccccggcctccaacggcacccgctgcttcccggtccactggtcccccgacccggcggccttctccgacgagaacctggacaagagcggctacgagccgcccctcgagtggttcaacaagtacgtcgtcaccaaggtcaccgagatggacctcgtggcggagcagcccagcgtcgagaccgtctacacctacgagggcgacgccgcctgggcgaagaacaccgacgagtacggcaagcccgccctgcgcacctacgaccagtggcgcggctacgcgagcgtcgtcacccgcacgggcaccacggccaacaccggcgccgccgacgccaccgagcagtcccagacccgcacccggtacttccgcggcatgtccggcgacgcgggccgcgccaaggtgcacgtcacgctcacggacgtgaccggcaccgcgaccaccgtcgaggacctgctcccgtaccagggcatggccgccgagacccttacctacaccaaggcgggcggcgacgtcgccgcccgcgagctggccttcccctacagcaggaagaccgcctcccgcgcccgccccggcctccccgccctggaggcgtaccgcacgggcacgacgcgcacggactccatccagcacatcagcggcgaccggacgcgcgccgctcagaaccacaccacatacgacgacgcgtacggcctgcccacccagacctactcgctgacactctcgccgaacgactccggcacccttgtcgccggtgacgagcggtgcaccgtcacgacgtacgtccacaacaccgccgcgcacatcatcggcctccccgaccgcgtccgcgccacgacgggcgactgcgccgccgcgccgaacgccaccaccggccagatcgtctccgacagccgcaccgcgtacgacgcgctcggcgccttcggcacggccccggtcaagggcctgccggtccaggtggacacgatctccggaggcggcacgagctggatcacctcggcgcgcacggagtacgacgcgctgggccgtgcgaccaaggtcaccgacgcggcgggcaactccaccacgaccacgtacagcccggcgaccggccccgcgttcgaggtcaccgtgaccaacgcggctggtcatgccacgaccaccaccctcgaccccggtcgcggctcggcgctgaccgtcaccgaccagaacggccgcaagaccaccagcacgtacgacgaactcggccgggccaccggcgtgtggacgccctcccgcccggtgaaccaggacgcgtccgtgcgcttcgtctaccagatcgaggacagcaaggtcccggcggtgcacactcgggtcctgcgcgacgccggtacgtacgaggagtcgatcgagctctacgacggcttcctccgcccccgtcagacccagcgcgaggcgctgggcggcggccgaatcgtcaccgagaccctctacaacgccaacggctctgcgaaggaagtgcgcgacggctacctggcggagggcgagcccgcgcgggaactgttcgtcccgctctccctcgaccaggtgccgagcgcgacgaggacggcctatgacggcctgggccggcccgtccggacgacgaccctccacaggggagtcccccggcactccgccaccacggcgtacggcggcgactgggaactgagccgcaccggcatgtcgcccgacggaacgacgccgctctctggcagccgcgccgtgaaggcgacgacggacgcgctcggccgcccggcccgcatccagcacttcaccacccagaacgtgtcggccgagagcgtcgacaccacgtacacctacgacccccgcggcccccttgcccaggtcaccgacgcccagcagaacacctggacgtacacgtacgacgcccgtgggcgcaagacgtcctccaccgacccggacgcgggcgccgcctacttcggctacaacgcgctggaccagcaggtctggtcgaaggacaaccagggccgcctgcagtacacgacgtacgacgtcctgggccgccagaccgagctgcgcgacgactccgcgtccggcccgctggtggcgaagtggaccttcgacaccctgccgggcgccaagggccacccggtcgcgtcgacccgctacaacgacggcgccgcgttcaccagcgaggtgaccggttacgacaccgagtaccgtccgaccggcaacaaggtcaccatccccagcaccccgatgaccacgggcctcgccggcacgtacacgtacgccagcacgtacaccccgaccggcaaggtccagtccgtcgacctgcccgcgacgcccggcgggctcgccgcggagaaggtgatcacccgctacgacggcgaggactcgcccaccacgatgtcgggcctggcctggtacacggccgacaccttcctcggcccgtacggggaagtgctgcgcacggcgtcgggcgaggccccgcgccgcgtgtggacgaccaacgtctacgacgaggacacccgccgcctcaccaggaccaccgcgcaccgggagacggctccccacccggtcagcacgaccacctacggctacgacacggtcggcaacatcacgtccatcgccgaccagcagccggcgggtaccgaggagcagtgcttctcgtacgacccgatggggcgcctcgtccacgcctggacggacggcaacagcgccgtctgccccaggacgtccacggcaccgggcgccggcccggcccgcgccgacgtctcggccggtgtcgacggcggcggatactggcactcgtacgcgttcgacgcgatcggcaaccggacgaagctgaccgtccacgaccgcaccgacgcggccctggacgacacgtacacctacacctacggcaagaccctgccgggtaacccgcagccggtccagccgcacaccctcacccaggtcgacgcggtgctcaacgagcccggatcgagagtcgaaccgcgctccacatacgcctacgacacctccggcaacaccacccagcgcgtcatcggcggcgacacccagaccctggcctgggaccgccgcaacaagctgacgtccgtcgacacgaacaacgacggcacaccggacgtgaagtacctgtacgacgcgtcgggcaaccgcctggtcgaggacgacggcaccacgcgcaccctcttcctcggcgaggccgagatcgtcgtcaacacggccggccaggccgtggacgcgcgccgctactacagcagccccggcgccccgacgacgatccgcacgaccggcggcaagaccacgggccacaagctgaccgtcatgctgtcggaccaccacagcacggcgacgaccgcggtcgagctgaccgacacccagccggtcacccgccgccgcttcgacccgtacggcaacccccgcggcaccgagccgaccacctggcccgaccgccgcacctacctgggcgtcggcatcgacgaccccgccacgggcctgacccacatcggcgcccgcgaatacgacgcatcgacgggccgcttcatctccgtcgatccggtcatggacctcacggacccgctccagatgaacgggtacacctacgccaacgcggacccgatcaacaacagcgaccccaccggactgttgctcgacgcccgaggcggcggcactcagaagtgcgtgggaacctgcgtcaaggacgtcacgaaccgaaagggaattccgctcccgcctggcgaggagtggaagcatgaaggggaggcgcaaaccgatttcaacggtgacggcttcatcaccgtcttcccgaccgtgaatgttccggcgaagtggaagaaggcgaagaagtacacggaggctttctacaaggcggttgatactgcttgcttctatggacgcgaaagctgtgcggatccggagtacccttcgcgggcgcatagcatcaacaactggaagggaaaggcatgcaaagccgtagggggaaaatgccctgagaggttgtcgtggggggagggtccggcgttcgctggtggcttcgcgatagcagcggaagagtatgcggggagagggggctaccggggcggtggggcgaggagggggtcgccctgtaagtgcttccttgccggcaccgaggtgctcatggcggatggcagcactaaaagtatcgaggacatcaagctcggtgacgaagtggttgcgactgatccggtaaccggtgaggccggtgcgcaccctgtctcggcgctgatcgccaccgagaacgacaagcgtttcaacgagctggtcattatcaccagcgagggtgtagagcgtcttaccgcaacgcatgagcaccccttctggtcgccatccgaaggggagtggttggaggcgggtgagctgcgcactggcatgacgctgcgctccgactctggcgaaactctcgtagtcgcaggaaaccgcgccttcacccagcgagcccggacctacaacctcacggttgcagacctccacacgtactatgtgctggcgggccagactccggtactggttcacaatgcaaactgtggacctcacctgaaggacctgcaaaaggactacccccggcgcactgtgggcatccttgacgtcggaactgatcagctcccgatgattagcggcccaggtggccagtcgggacttctcaagaacctcccaggtcgtacgaaggccaacggggagcacgtggagactcacgcagcagcgttcttgcgtatgaacccgggtgtcagaaaggccgtgctctacatcgactacccgacggggacctgcggaacatgtagaagtacattgcctgacatgctgcccgagggtgttcagttgtgggtgatctcgccgcgtaggactgaaaaattcacgggacttcctgactga

SEQ ID NO: 136 - protein, 115 aa, Unknown
  Synthetic
MGDRLPAFVDGGDTLGIFSRGGIERDLASGVAGPASSLPKGTPGFNGLVKSHVEGHAAALMRQNGIPNAELYINRVPCGSGNGCAAMLPHMLPEGATLRVYGPNGYDRTFTGLPD

SEQ ID NO: 137 - DNA, 348 bp, Unknown
  Synthetic
ctgggtgaccggctccctgccttcgtggacggtggagacacgttgggcatcttttctcgcggaggtattgagcgggacctcgccagcggagttgcgggtcctgcaagtagccttcctaaaggcacgcctggcttcaatggtcttgtaaagagtcatgttgaagggcatgcggctgcgctaatgagacaaaatggaattccgaacgctgagctgtatatcaacagagtgccgtgcggttcaggtaatggctgcgcagcgatgttgccgcatatgcttccggaaggtgccaccctccgcgtatatgggccgaacgggtacgatagaaccttcactggacttccggactga

SEQ ID NO: 138 - protein, 2427 aa, Unknown
  Synthetic
MAAVPSAEALAAKRARDTIWTPPNTPLGSQTKSVDGENLVPGRLPGPLEPEPADWTPGGPASVPAPGSADVTLGFDSAEAAAARKATGGAAPASDGAALRAGSLPVVIGAAKDAKSGAHRIRVELVDQAKSRAAHLDSPLIALTDTEPDTPPSGRTTKVSLDLKGIGAQTWADRARLVALPACALETPDRPECQQQTPVQSSVDLRSGLLTAEVILPAATEGTAPPTKSSLGSGTASGVVQAGLTTAAPAKAAPTVLAATAGASGSGGSFSATSLSPSAAWGAGSNVGNFTYSYPIQTPPSLGGTAPSVGLGYDSSAVDGKTSAQNSQSSWLGEGWGYEAGFIERGYKSCNTAGIANSSDMCWGGQNATLSLAGHSGTLVRDDTTGVWHLQSDDGTKIEQLTGAPNGLQNGEHWRITTTDGTQFYFGRNHLPGGDGTDPASNSAFKEPVYSPKSGDPCYNSSTATGSWCTMGWRWNLDYAVDVHGNLITYTYAQETNYYSRGAGQNSGSGTLTDYTRAGYLTQIAYGQRLSEQVTAKGAAKAAALITFTAAERCVPSGSITCTEAQRTTANASYWPDTPLDQVCASTGTCTRAGPTFFTTKRLASLTTQVLVSGAYRTVDTWTLTHSFKDPGDGNAKSLWLDSIQRTGTNGQTAVTMPPVTFTAVMKPNRVDGDLTLKDGTKVTVTPFNRPRLQQVTTETGGQINVVYTTSSDAAHPACSRLAGTMPAAADGNTLACAPVKWYLPGSSSPDPVDDWFNKYLISAVTEQDAISGTTLIKATNYTYNGDAAWHRNDAEFTDAKTRTWDGFRGYQSVTSTTGSAYPGEAPRTQQTATYLRGMDGDVKADGSTRSVQVANPLGGPALTDSPWLAGSSFATQTYDQAGGTVISANGSVAGGQQVTATHAQSGGMPALVARYPASQVTTTSKSKLSDGTWRTNTTVSTSDPAHANRPLSSDDKGDGTPGAELCSTNGYATGTNPMMLNILAERTVTKGACGTPVTSANTVSSARTLYDGKPYGQAGDLAESTSALTLDHYDTGGNPVYVHTAASTFDAYGRLTSVSEANGATYDAAGNQLTAPNLTPATTRTAYTPATGAIATTVTQTTPTGWTTTLTQDPGRAEALVSTDANGRATTQQYDGLGRLTAAWSPERATNLTPSQKFSYAVNGTTGPSVVTSQWLKEAGGYAYKNELYDGLGRLRQVQRTSDTYSGRLITDTVYDSHGWPVKTASPYYEKTTAPNSTVYLPQDSQVPAQTWVTFDGIGRTTRSAFVSYGQQQWATTTAYPGADRTDVTPPNGKYPTSTFTDGRNQVSALWQYRTATPTGNPADATVTTYTYDAANRPATRKDAAGNTWSYGYDLRGRQTTVTDPDTGTTTTAYDVNSRAVSTTDGKGNTLVVSYDLIGRKTGLYQGSIAPANQLAGWTYDTLPGGKGKPTSSTRYVGGAGGSAYTQAVTGYDAGYRPTGTSVTIPASEGKLAGTYTTGLTYNPVLGTLKQTDLPAIGAAPAESVMYTYNISGVLQKSYSDTYYVYDVQYDAFGRPVRTTTGDAGTQVVSTQLDKTDYTYNQAGDVTSVTDVQNGTATDAQCFTYDHLGRLTQAWTDTAGSTSTTSGTWTDTSGTVHNSGSSQSVPALGACANANGPASTGSPAKLSVGGPSPYWQSYGYDSTGNRTTLVQHDTTGNTTKDTTTTQTFGPAGSVNTATGAPNTGGGTGGPHALLTSSTTGPTGTQVTSYQYDQLGNTTAVTETSGTTTLAWNGEDKLASVTKTGQAQATSYLYDADGNQLIRRNPGKTTLNLGSDEVTLDTAANSLTDTRYYSAPGGISIARTTGPTGASALAYQASDPHGTANVQINVDAAQTTTRRPTDPFGNPRGTQPAPNTWAGDKGFVGGTKDDTTGLTNLGAREYQPTTGRFLNPDPLLDAGNPQQWNGYAYSDNDPVNSSDPSGLITNALADGDTYVARPAAFCVTMSCVEQTSGPGFWEDKRVGDAVFAAVVQATTQSNGNGSSQTKKEKGIWGQAWDWTKKNGGAILGALVEGAVFSTCFIGAGFAAPATGGITVIAGAAACGAVAGEAGALTTNILTPDADHSVDGITNDMVVGEITGAAVSAASEGASSLAKPAVRKLLGMEAEEGLEAAGRAATGPCNSFPAGVTVLLADGTTKPIEQIAQGDQVTATDPQTGTTQAEPVTDTIIGHDDTEFTDLTLTNDADPRAPPSEITSTTHHPYWNATTSRWTDAGDLKPGDHVRTPDGTELTVNTVYSYTTQPRTARNLTVADLHTYYVLAGNTPVLVHNTGPGCGEPGFVSDAANSLSGRRITTGQIFDASGNPIGPEITSGGGSLADRAQSYLADSPNIRNLPAKARYASADHVEAQYAVWMRENGVTDASVVINQNYVCGLPLGCQAAVPAILPRGSTMTVWYPGSGSPIVLRGVG

SEQ ID NO: 139 - DNA, 7323 bp, Unknown
  Synthetic
gtgctggggacagcggccgcgctcgcggtcatgatgtccatggcggcggtgccgtccgccgaggcactggccgcgaagcgggcacgcgacaccatctggacgccgcccaacaccccgctgggcagccagaccaagtccgtcgacggcgagaacctcgtcccgggccgcctgcccggccccctggagccggaaccggccgactggacacccggcggaccggcatccgtgcccgctccgggcagcgcggacgtcaccctcggcttcgactccgcggaggccgccgccgcccgcaaggccaccggcggcgccgcccccgcctccgacggcgcggccctccgcgcgggctccctccccgtcgtcatcggcgcggcgaaggacgccaagagcggcgcccaccggatccgcgtcgagctcgtggaccaggccaagagccgtgccgcacacctcgacagcccgctgatcgcactcaccgacaccgagccggacaccccgccctccggtcggaccacgaaggtgtccctcgacctgaagggcatcggcgcccagacctgggcggaccgcgcgcgactcgtcgccctgcccgcctgcgccctggagacgcccgacaggcccgagtgccagcagcagacccccgtgcagagctccgtcgacctgcgctccggactgctgacggccgaggtcattctgcccgccgccaccgagggcaccgccccgcccaccaagagctccctcggctcgggcaccgcctccggcgtcgtccaggccggcctcaccacggcggcgcccgccaaggccgcgcccacggtgctcgccgcgaccgccggcgcgtccggctcgggcggcagcttctcggcgacctcgctgtcgccctccgcggcctggggcgccggctccaacgtcggcaacttcacctactcgtacccgatccagacgcctccctcgctcggcgggaccgccccctccgtgggcctcgggtacgactcgtccgccgtcgacgggaagacctccgcgcagaactcccagtcctcctggctcggcgagggctggggctacgaggccgggttcatcgagcgcggctacaagtcctgcaacacggccggcatcgcgaactcctcggacatgtgctggggcgggcagaacgccaccctctcgctggccggccactccggcaccctggtgcgcgacgacaccaccggcgtctggcacctgcagagcgacgacggcacgaagatcgaacagctcaccggcgcgcccaacggcctgcagaacggcgagcactggcggatcaccacgaccgacggcacgcagttctacttcggccgcaaccacctgcccggcggcgacggcaccgacccggcgagcaactccgccttcaaggaaccggtgtactcgcccaagagcggcgacccctgctacaactcctccaccgccaccggctcctggtgcacgatgggctggcgctggaacctcgactacgccgtcgacgtccacggcaacctgatcacctacacctacgcccaggagaccaactactacagccgaggcgccggccagaacagcggcagcggcaccctgaccgactacacccgcgccggctacctcacccagatcgcctacggccagcgcctgagcgagcaggtcaccgccaagggcgcggccaaggccgctgccctcatcaccttcaccgccgcggaacgctgcgtcccgtccggctcgatcacctgcaccgaggcacagcgcacgaccgcgaacgcctcgtactggccggacaccccgctcgaccaggtctgcgcctccaccggcacctgcacccgggccggcccgacgttcttcaccaccaagcgcctcgcctccctcaccacccaggtcctggtctccggcgcctaccgcaccgtcgacacctggacgctcacccattccttcaaggacccgggcgacggcaacgccaagtcgctgtggctcgactcgatccagcgcaccggcaccaacgggcagaccgcggtcaccatgccgcccgtcaccttcacggcggtgatgaagccgaaccgggtggacggggacctcaccctcaaggacggcaccaaggtcaccgtcaccccgttcaaccggccccgcctccagcaggtcaccacggagaccggcggccagatcaacgtcgtctacaccacctcctccgacgccgcgcaccccgcctgctcgcgcctggccggcaccatgcccgccgcggcggacggcaacaccctcgcctgcgcccccgtcaagtggtacctgcccggatccagctccccggacccggtcgacgactggttcaacaagtacctgatcagcgccgtcaccgaacaggacgcgatcagcggcaccaccctgatcaaggccaccaactacacctacaacggcgacgccgcctggcaccgcaacgacgccgagttcaccgacgccaagacccgcacctgggacggcttccgcggctaccagtccgtcaccagcaccaccggcagcgcctacccgggcgaggcccccaggacccagcagaccgcgacctacctgcgcggcatggacggcgacgtcaaggccgacggctccacccgcagcgtccaggtcgccaacccgctcggcggcccggccctcaccgacagcccgtggctggccggctccagcttcgccacccagacctacgaccaggccggcggcaccgtcatctccgccaacggctccgtcgccggcggccagcaggtcaccgccacccacgcccagagcggcggcatgccggccctggtcgcccgctaccccgcctcccaggtcaccaccacctccaagtccaagctctccgacgggacctggcgcaccaacaccaccgtcagcaccagcgaccccgcgcacgccaaccgccccctcagcagcgacgacaagggcgacggcacccccggcgccgaactgtgcagcaccaacggctacgccaccggcaccaacccgatgatgctgaacatcctcgccgagcggacggtcaccaagggcgcctgcggcacccccgtgacctcggccaacaccgtctcctccgcccgcaccctctacgacggcaagccctacggccaggccggcgacctcgccgagtccaccagcgccctgaccctggaccactacgacaccggcggcaaccccgtctacgtccacaccgccgcctccaccttcgacgcctacggccggcttaccagcgtcagcgaggccaacggcgccacctacgacgccgcgggcaaccagctcaccgcgcccaacctcacccccgccaccacccgcaccgcctacaccccggccaccggcgccatcgccaccaccgtcacccagaccacgcccaccggctggaccaccaccctcacccaggacccgggccgcgccgaagctctggtctccaccgacgccaacggccgcgccaccacccagcagtacgacggcctcggccgcctgaccgccgcctggtcaccggagcgcgcgaccaacctcacccccagccagaagttctcctacgcggtcaacggcaccaccggcccctccgtcgtcacctcccagtggctcaaggaagccggcggctacgcgtacaagaacgagctgtacgacggcctcggccgcctgcgccaggtccagcgcaccagcgacacctactccgggcggctgatcaccgacaccgtctacgactcgcacggctggcccgtcaagaccgccagcccgtactacgagaagaccaccgcgcccaacagcaccgtctacctgccgcaggactcccaggtgcccgcccagacctgggtcaccttcgacggcatcggccggaccacccgctccgcgttcgtctcctacggacagcagcagtgggccaccaccaccgcctaccccggcgccgaccgcaccgacgtcaccccgcccaacggcaaatacccgaccagcaccttcaccgacggccgcaaccaggtcagcgccctgtggcagtaccgcaccgccacccccaccggcaacccggccgacgcgaccgtcaccacctacacctacgacgccgccaaccggcccgccacccgcaaggacgccgccgggaacacctggagctacggctacgacctgcgcggccgccagaccaccgtcaccgaccccgacaccggcaccaccaccaccgcctacgacgtcaactcgcgcgccgtctccaccaccgacggcaagggcaacaccctcgtcgtcagctacgacctgatcggccgcaagaccggcctctaccagggcagcatcgccccggccaaccagctcgccggctggacgtacgacaccctgccgggcggaaagggcaagcccacctcctccacccgctacgtcgggggcgccggcggctcggcctacacccaggccgtcaccggctacgacgccggctaccggcccaccggcacctcggtgacgatccccgccagcgaaggcaagctcgccggtacctacaccaccggcctgacgtacaacccggtcctcggcacgctcaagcagaccgacctgccggccatcggcgcggcgcccgccgagagcgtcatgtacacctacaacatctccggcgtcctgcagaagtcctacagcgacacctactacgtctacgacgtgcagtacgacgccttcggccgcccggtccgcacgaccaccggcgacgccggaacccaggtcgtctccacccagctcgacaagaccgactacacctacaaccaggccggcgacgtcacctcggtcaccgacgtccagaacggcaccgccaccgacgcccagtgcttcacctacgaccacctcgggcgcctcacccaggcctggaccgacaccgcgggctccaccagcaccaccagcggcacctggaccgacacctccggcaccgtccacaacagcggctcctcccagtccgtccccgcactcggcgcctgcgccaacgccaacggccccgccagcaccggcagccccgccaagctctccgtcggcggcccctccccgtactggcagagctacggctacgacagcaccggcaaccgcaccaccctcgtccagcacgacaccaccggcaacaccaccaaggacaccaccaccacccagaccttcggccccgccggatcggtcaacaccgccaccggcgcccccaacaccggcggcggcaccggcggcccgcacgccctgctcaccagcagcaccaccggacccaccgggacccaggtcaccagctaccagtacgaccagctcggcaacaccaccgcggtcaccgagacgtccggaaccaccaccctcgcctggaacggcgaggacaagctcgcctccgtcaccaagaccggccaggcccaggccaccagctacctctacgacgccgacggcaaccagctcatccgccgcaaccccggcaagaccaccctcaacctcggcagcgacgaggtcaccctcgacaccgccgccaactccctcaccgacacccgctactacagcgcccccggcggcatcagcatcgcccgcaccaccggacccaccggcgcaagcgccctcgcctaccaggcctccgacccccacggcaccgccaacgtccagatcaacgtcgacgccgcccagaccaccacccgccgccccaccgaccccttcggcaacccccgcggcacccagcccgcccccaacacctgggccggcgacaagggcttcgtcggcggcaccaaggacgacaccaccggactcaccaacctcggcgcccgcgaataccaacccaccaccggccgcttcctcaaccccgacccactcctcgacgccggcaacccccagcagtggaacggctacgcctacagcgacaacgaccccgtcaacagctccgaccccagcggactcatcaccaacgccctggccgacggcgacacctacgtcgcccgccccgccgccttctgcgtcaccatgtcgtgcgtcgagcagaccagcggccccggtttctgggaggacaagcgcgtcggtgacgccgtcttcgccgccgtcgtccaggccaccacgcagagcaacggcaacgggtcatcccagaccaagaaagagaagggcatctggggccaggcctgggactggaccaagaagaacggcggcgccatcctcggagcgctggtagagggagcggtcttcagcacatgcttcatcggagctggattcgccgcacctgcaacgggaggaatcaccgtcatcgccggtgctgcggcctgcggggctgtggccggcgaggcaggggcactgaccaccaatatcctcaccccagatgccgaccactccgtcgacggcatcaccaacgacatggtcgttggtgaaatcaccggggcggctgtcagcgcagcgagcgagggcgcaagctccctcgccaagccggcggtccgcaaactcctgggcatggaagccgaggaaggactcgaggcagcaggccgcgccgccaccggaccttgcaacagtttcccggccggcgtcaccgtcctcctcgccgacggcaccaccaagcccatcgaacagatcgcccagggcgaccaggtaaccgccaccgacccgcagacaggcaccacccaggcagaacccgtcaccgacacgatcatcggccacgacgacacggaattcaccgacctcaccctcaccaacgacgcagacccccgcgccccgcccagcgagatcacctccaccacccaccacccctactggaacgccaccaccagccgctggaccgatgccggcgacctcaagcccggcgaccacgtccgcacccccgacggcaccgaactgaccgtcaacaccgtctacagctacaccacacaaccccggaccgcgcgcaacctcaccgtcgcagacctccacacgtactatgtgctcgctggaaatacgccggtcctagtgcataacaccggcccgggatgtggtgagccgggattcgttagtgacgctgctaattctctctcgggcaggcgcatcaccacgggacaaatatttgatgcgagcgggaatccgatcgggcctgagatcacgagcggcggcggcagtctggcagatagggcgcagagttatcttgccgactcccctaatattcgaaatctgcccgctaaggcgagatatgcgtcggctgaccacgttgaggcgcaatatgcagtgtggatgcgagaaaatggagtgaccgacgccagtgtggtcatcaatcaaaactatgtatgtgggctgcccctaggctgccaggcggcggtgcccgctatcctccctcgcggctcgaccatgacggtatggtatccagggtcaggaagtcccatcgtattgcggggagtgggttaa

SEQ ID NO: 140 - protein, 2594 aa, Unknown
  Synthetic
MRAFRLIACLLAFSAAAAPAAADTSSMLGRLPEASARQLKERLAPRGLASAAALRQYLDASQRELDTAPEADDVPARSQRFAARAGELTALREQARRDLASLEDAAKASGSAEATQRIGRIRGQVDARFDRLEGLFTTWRNAPQGSERRQARRELRAALATLRHAGTPAPAAIPVPTLGPLQPAGEPAANPPAARLPAYAQADDATGDPFTPGGFRLMKVAALPPAVAAEAATDCSATSADLADDGKDVRLTQPIRDLAASLDYSPARILRWTQQNVAFEPYWGALKGAEGVLQTRAGNSTDQASLLIALLRASNIPARYVRGTVQLNDTAAQDDAGGRAQRWLGTKRYRASAAVLAGGGTSAGLQSIDGTVRGIRFSHVWVQACVPHGAYRGARAEAGGYRWLALDAAVKDHDYQQGIAVDVPLTDAAFYTPYLAARSDQLPHEHFAQKVAEAARATDANAALADVPYAGTPRPLRYDVLPGSLPYEVEAFTNWPGLGSSETASLPDAHRHTFTVTVRNGATTLASAALPYPQNAFKRVTLSYQPTAASQAAWNAWTGDLPAAADGSIQVVPQIKADGTVLAAGAPANALPLAGVHNVILKVSQGERSGAACINDSGNPADPKDTDGTCLNKTVYTNIKAGAYHALGLNALHTSNAFLGQRLEALAAGVQAYPVAPTPAAGAGYEATVGELLHLVLQDYLHQTEQADQRNAALRGFKSVGPYDLGLTASDLETDYLFDIPVAIKPAGVFVDFKGGLYGFVKLDTTAETAAARAAENVDLAKLSIYSGSALEHHVWQQALRTDAVSTVRGLQFAAEQGIPLVTFTAANIGQYDSLMQMSGATSMAAYKSAIQNAVKGSDNGNHGVVTVPRAQIAYADPVDPASKWTGAVYMSQNPVTGEYGAIINGTIAGGFPLLNSTPFSNLYNFDSFVPNTLLGTNGGAGAVQTLPGGTQGESSWITKAGDPVNMLTGNYTLQARDFTIKGRGGLPIVLERWFNAQNATDGPFGFGWTHSFNHQLRFYGIESGQSKVGWVDGTGAQRFYAVAAAGSIAPGTTLAAQAGVFTTLSRLADGRFQVRETNGLTYSFESLTSPTTPPAAGSEPRARLLAIADRHGNTLTLNYSGSQLASVSDSLGRTVLSFTWNGNRIGKVKDVSGREVNYAYEDGNGNLTRVTDPLGQATRYSYYTSADGAKLDHALRRHTLPRGNGMEFEYYAGGQVFRHTPFDTSGNLIPESALTFHYNSYRRESWTVDGRGAEERFLFDTHGNVIQQTAANGATHTYAYADPNDPHLRTRMTDPVGRVTQYSYTAEGYLQTLTLPSGAVQAWRDYDAFGQPRRVKDARGNWTLHHYDTAGTRTDSIRVKSGVVPTVGTAPAAANVVSWIKYQGDSVGNLTGVKRLRDWTGATLGNFASGSGPVVTTTFDAARLNVASVGRSGNRNGSQISETSPIFSHDALGRLTGGVDGRWYPVAFDYDVLDRVTRATDATGQPRRYAFDVNGNRIGTELIAGGSRIDSSVAAFDVQDRVAHVLDHAGNRVAYAYDAVGNRVSVESPDGYAIGFDYDLAGRPYSAYDEDGNRVFSAFDVAGRVRAVIDPNGAATLYDYHGDEQDGRLARVEQPAIPGQNAGRAAETDYDAGGLPIRVRQVSAGGEAREGYRFHDELGRVVRSVSAPDDVGQRLQVCYSYDALSNLTQVRAGATTDTTSAACAGSPAVQLTQSWDDFGNLLTRTDALGRVWKFEYDAHGNLVASQTPEQAKVSTRSTYRYDPALHGLLAGRSVPGSGSAGQSVSYARNALGQVIRAETRDGAGNLVVAYDYQYDAAHRVVRIVDSRGGKALDYAWTPAGRLASITLDGHVWRFQYDGVGRLAAIVAPNGATIAMARDAAGRLTERRWPDGAKSAFDWLPEGSLAAIEHSAGGSALAQFAYAYDAWGNRTSATETLAGTSRSLAYGYDALDRLKTVTTDGATETHAFDLFGNRTSKTTGGVTTDYLFDAAHQLTQVQIAGTPTERLAYDDNGNLRKHCVGSPSGSTSDCTGTTVLSLAWNGLDQLIQAARTGLPAESYAYDDAGRRVTKAVGSSATHFAYDGPDILAEYASPAGSPTAVYAHGAGIDEPLLRLTGATSTPAASAHHYAQDGLGSIVAAYGEIGASGPVSAASVSATHSYSAGSYPPAKLIDGETTGSTGFWAGSSGNFAADPAVITLELGAEKSVSRVRLHRVASYLPDYVVKDAEVQVRKPDNSWQTVGTLTNNTSEDSPEIVLTGAPGSALRVLVKGVRNGSLVLMAEVTMSADGGAASVATARYDAWGNVTQASGSIPAFGYTGREPDATGLVYYRARYYHPALGRFASRDPLGLAAGINPYAYAGGNPILYNDPDGLLAQLAWNTAASYWGQPIVQETVATIRNGAAVAAGNFVPDTVNGATGWFEQFLHQESGSFGRMDSWVDVRNPVAQDVAQDLRGVAAVGLMMTPLRYGRASNASFNPPVANLPLNTGGKTSGMLHIPGQESLSLTSGIAGPSQVVRGQGLPGFNGNQLTHVEGHAAAYMRTHKVSEAVLDINKAPCTAGSGGGCNGLLPRMLPEGAHLTIRHPNGVQVYIGTPD

SEQ ID NO: 141 - DNA, 7785 bp, Unknown
  Synthetic
atgcgtgccttccgcctgatcgcctgccttctcgccttttcggcggcagccgcacctgctgcggctgacacgtcgtcgatgctggggcgtctgcctgaagcaagcgcccgccagctcaaggagcggttggcgccgcgtggccttgcctccgctgccgccttgcgccagtacctggacgcctcgcaacgcgagctggacaccgcaccggaagcggacgacgtacccgcccgcagccaacgctttgccgcaagggcgggcgaactcaccgcgctgcgcgaacaggcgcgccgggatctcgccagtctggaggacgccgcgaaggcgagcggctcggccgaggcgacgcagcgcatcggtcgaatccgcgggcaggtggacgcacgcttcgaccggctcgaagggctttttaccacttggcgcaatgcgccccagggcagcgaacgccgccaggcccgccgcgaactgcgtgccgcgctcgccacgctccgccatgccggcaccccggctccggctgcgattcctgttcctaccctcggccccctgcaaccggccggcgagccggctgccaacccaccggccgcgcgcttgccagcctatgcgcaagcggatgacgcgactggcgacccctttacccccggtggcttccggctgatgaaggtcgccgcactgccgccggcggtcgcggccgaggcggcaacggactgctccgccaccagcgccgacctggccgacgacggcaaggacgtgcgcctgacccagccgatccgcgacctcgcggcatcgctcgactactcaccggcacgcatcctgcgctggacgcagcagaacgtcgccttcgaaccctactggggggcactcaagggggcggaaggcgtgctgcagacgcgcgccggcaacagcaccgaccaggccagcctgctgatcgcactcttgcgggcctccaacattcccgcccgctacgtacgcggcaccgtgcagctcaacgacactgccgcgcaggacgacgcaggcgggcgggcgcagcgctggctgggcaccaagcgctaccgtgcatcggccgcggtactcgccggcggcggaacttccgccggcctgcagtcgatcgacggcaccgtccgcggcatccgcttcagccatgtctgggtccaggcctgcgttccccatggcgcttaccgcggtgcccgcgcggaagccggcggctatcgctggctggcgctggacgcggcggtgaaggaccatgactaccagcagggcatcgcggtcgatgtgccgctcaccgatgccgcgttctacacgccctatctggcggcgcgcagcgaccagttgccgcacgagcatttcgcacagaaggtggcggaggcggcgcgtgcgaccgacgccaatgcggcgctggccgacgtgccctacgccggtacgccgcggccgctgcgctacgacgtgctgcccggttcgctgccctacgaggtcgaagccttcaccaactggcccggcctcggttcgtccgaaaccgcaagcctgccggacgcacaccgccacaccttcaccgtgacggtcaggaacggcgccaccacgttggcgagcgccgcgctgccctatccgcagaacgccttcaagcgcgtcacgctgtcctatcagccgactgccgcctcgcaggcggcctggaacgcctggacgggcgatctgcccgccgcggccgacggcagcatccaggtcgtgccgcagatcaaggccgacggtaccgtgctcgccgcaggtgcgcccgccaacgcgctgccgctcgccggcgtgcacaacgtcatcctcaaggtctcgcagggcgagcgcagcggtgccgcgtgcatcaacgacagcggcaaccccgccgacccgaaggacaccgacggcacctgcctcaacaagaccgtctacaccaacatcaaggccggcgcctaccacgccctgggcctgaatgcgctgcacacctcgaatgccttcctcggccagcggctcgaagcgctggcggccggcgtgcaggcctatcccgtcgcgcccacgccggccgcgggtgccggctacgaggccacggtcggtgaattgctgcatctggtgctgcaggactacctgcaccagaccgagcaggccgaccagcgcaacgccgcgttgcgcggcttcaagagcgtggggccgtacgacctcgggctgaccgcgtccgacctcgaaaccgactacctcttcgacatcccggtcgcgatcaagccggccggcgtgttcgtggacttcaagggcggcctctacggtttcgtcaaactcgataccacggccgagacggccgcggcacgcgccgccgaaaacgtggatctggccaagctctcgatctactccggctccgcgctcgaacaccacgtctggcagcaggcgctgcgcaccgatgcggtgtccaccgtgcgtgggctgcagttcgccgccgagcagggcattccgctcgtcaccttcaccgcggccaacatcggccagtacgacagcctcatgcagatgagcggcgccaccagcatggccgcttacaagagcgcgatccagaacgcggtgaagggctcggacaacggcaaccacggcgtcgtcaccgtgccgcgcgcccagatcgcctacgccgaccccgtcgatccggcgagcaaatggaccggcgcggtctacatgtctcagaaccccgtcaccggagagtacggggcgatcatcaacggcaccatcgccggcggcttcccgctgctcaacagcacgcccttcagcaatctctacaacttcgattccttcgtgcccaacaccctccttggcacgaacgggggtgccggtgcggtgcagaccctgcccggcggcacccagggcgagagttcctggatcaccaaggccggcgacccggtgaacatgctcaccggcaactacacgctgcaggcacgcgacttcaccatcaagggccggggcggactgccgatcgtgctggagcgctggttcaacgcgcagaacgccaccgacgggccgttcggcttcggctggacgcacagcttcaaccatcagttgcgtttctacggcatcgagagcggccagtccaaggtcggctgggtggacggcactggcgcccagcgcttctacgccgtggccgccgccggcagcattgcgccgggcacgacgctggccgcgcaggccggggtgttcacgacgctgtcgcgtctggccgacggccgcttccaggtgcgcgagaccaacggcctcacctacagcttcgaatcgctcacgagcccgaccaccccgccggccgcgggcagcgaaccgcgcgcaagactgctggccatcgccgaccgccacggcaacaccctgacgctcaactacagcggcagccagcttgcctcggtgagcgacagcctcggccgcacggtgctcagcttcacctggaacggcaaccgcatcggcaaggtgaaggacgtcagcggacgggaagtgaactacgcctacgaggacggcaacggcaacctcacgcgcgtcaccgatccgctgggtcaagccacgcgctacagctactacaccagtgccgacggtgccaagctcgaccacgccctgcgccgccacaccctgccgcgcggcaacggcatggagttcgagtactacgccggtggccaggtcttccgccacacgccgttcgacaccagcggcaacctcattcccgaatcggcgctgaccttccactacaacagttatcggcgcgagagctggacggtcgatggccgcggtgccgaggagcgcttcctgttcgacacgcacggcaacgtgatccagcagaccgccgccaacggtgccacccacacctacgcgtacgccgacccgaacgatccgcatctgcgcacgcgcatgacagacccggtcggccgcgtcacccagtacagctataccgccgaaggctatctgcagaccctgacgctgccgtcgggcgccgtgcaggcgtggcgcgactacgacgccttcggccagccccgccgcgtcaaggacgcgcgcggcaactggacgctccaccactacgacaccgccgggacacggaccgactccatccgggtcaaatcgggcgtggtccccaccgtcggcaccgcgcctgccgcggccaacgtcgtttcctggatcaagtaccagggcgacagcgtgggcaacctcaccggcgtcaagcgcctgcgcgactggacgggcgcgaccctgggcaatttcgccagcggcagcggccccgtcgtcaccaccaccttcgatgcggccaggctcaacgtcgccagcgtcggccgtagcggcaaccgcaacggcagccagatcagcgagaccagcccgatcttctcccacgacgcgctggggcgcctcaccggcggggtggacgggcgctggtatccggtcgccttcgattacgacgtgctcgaccgcgtcacccgcgccaccgacgccacgggccagccgcgccgctacgcgttcgacgtcaacggcaaccgcatcggtacggagctgattgccggcggcagccgtatcgattcctcggtggccgccttcgacgtgcaggaccgcgtcgcccacgtcctcgatcacgccggcaaccgcgtggcctacgcctacgatgcggtgggcaaccgggtgagcgtggaaagccccgacggctacgccatcggcttcgactacgacctcgccggacggccctattcggcctacgacgaagacggcaaccgcgtcttctccgccttcgacgtggccgggcgcgtgcgagcggtcatcgaccccaacggcgccgcgacgctctacgactatcacggcgacgagcaggacgggcgtctcgcgcgcgtggagcagcccgccatcccgggccagaacgcgggccgcgccgccgagaccgactacgatgcgggtgggttgcccatccgcgtgcgccaggtctcggccggcggcgaagcgcgcgaaggctaccgtttccacgacgagcttggccgcgtggtgcgcagcgtctccgcgccggacgacgtcggccagcggctgcaggtctgctacagctacgatgcactctcgaacctcacccaggtgcgcgccggcgccaccaccgacaccaccagtgccgcctgcgccggcagccccgcggtgcagctcacccagagctgggacgactttggcaacctgctgacgcgcaccgacgcgctgggccgggtgtggaagttcgagtacgacgcccacggcaacctcgtcgccagccagacgcccgagcaggccaaggtctcgacgcgcagcacctaccgctacgatccggcgctgcacggcttgctggccgggcgcagcgtgccgggcagcggcagtgcgggccagagcgtgagctatgcgcgcaacgcgctcggccaggtcatccgcgccgagacgcgcgacggcgcgggcaacctcgtcgtcgcctacgactaccagtacgacgccgcccaccgtgtggtgcgcatcgtcgacagccgcggcggcaaggcgctcgactacgcctggacgcccgccgggcggctggcgagcattaccctggacggccatgtctggcgcttccagtacgacggcgtcggccggctcgccgcgatcgtcgcgcccaacggcgccaccatagcgatggcacgcgatgccgccgggcggctcaccgagcggcgctggcccgacggcgcgaagagcgccttcgactggctgcccgaaggcagcctcgccgccatcgagcacagcgcgggcggcagcgcgctcgcacagttcgcctatgcctacgatgcctggggcaaccgcacgagcgccaccgagaccctcgcgggcaccagccgcagcctcgcctacggctacgacgcgctcgaccgcctgaagaccgtcaccaccgacggtgcgaccgaaacccatgccttcgatctcttcggcaatcgcaccagcaagaccacgggcggggtgaccaccgactatctcttcgacgcggcgcaccagctcacccaggtgcagatcgccggcacccccaccgagcggctcgcctacgacgacaacggtaatctccgcaagcactgcgtcggcagtccgagtggcagcaccagcgattgcaccggcaccaccgtgctgagcctcgcctggaacggcctcgaccagttgatccaggccgccaggacgggcctgcccgccgagtcctacgcctacgacgatgccgggcggcgtgtcaccaaggcggtgggcagcagcgccacccacttcgcctacgacggtcccgacatcctggccgagtacgccagcccggccggcagccccaccgccgtctatgcccacggtgccggcatcgacgaaccgctgctgcgcctcaccggcgcgacgagcacgccggccgcttccgcgcaccactacgcgcaggacgggctgggcagcatcgtcgcggcctatggcgagatcggcgccagcggtccggtcagtgccgcgagcgtatcggccacccacagttacagcgccggcagctacccgccggcaaagctgatcgacggcgagacgaccggaagcaccgggttctgggctggcagctcgggcaacttcgctgccgatccagccgtgatcacgctggaactgggtgcggagaaaagcgtgagccgcgtgaggctgcaccgggtggccagctacctgcccgactacgtggtcaaggatgccgaggtgcaggtccgaaaaccggacaattcgtggcagacggtcggcacgctgacaaacaacaccagcgaagacagtcccgagatcgtgctcaccggcgcccccggcagcgcgctgcgcgtgctcgtcaagggcgtgcgcaacggcagcctggtgctgatggccgaggtgacgatgagtgcggacggtggcgcggccagcgtggccaccgcccgctacgacgcctggggcaacgtcacgcaggcgagcggcagcatcccggccttcggctacaccggacgcgagcccgatgccacgggcctggtctactaccgcgcccgctactaccaccccgcgctcggccgcttcgccagccgcgacccgctggggctggcggcggggatcaatccctacgcctacgcgggcggcaatcccatcctctacaacgatccggatggcttgctggcgcaactggcgtggaatacggcggccagctactggggacagccgatagttcaagaaacggtcgccacgattcgaaatggggccgcagtggccgctggcaacttcgttccagacacggtcaacggtgcaacaggttggtttgagcagttcctgcaccaagaatcgggctcgttcgggcgcatggactcgtgggtggatgtgcgaaaccccgttgcgcaggacgtagcccaggacctgcgcggtgtcgcagccgttgggttaatgatgacgccgctgcggtatggtcgtgcctccaacgcgtctttcaatccgccagtagccaatcttccgctcaacactggaggaaaaacatctggcatgttgcacattccagggcaagaatcactgtcgctcacgagcggaattgcggggccgtctcaagtcgttagaggtcaaggtttgccaggattcaacggtaatcagttgacccatgtggaaggtcatgctgctgcttacatgcggactcacaaggtctctgaggctgttctggacataaacaaagcaccttgcaccgctggtagtggtggtggatgtaatgggttgcttccccgaatgctgccggagggggctcatttaacaattcgacacccaaatggtgttcaagtttatattggcactcctgactaa

SEQ ID NO: 142 - protein, 2227 aa, Unknown
  Synthetic
MSMSASRSQPAFPFVSASSPRPRRRPPFPRALLLLIAVLLVGACGDAGGPLLWSSSSQALWEPSPIPPLPPLLCLGPGDGPSPFPPDLTQGTTTAAGTLPGSFSVTSTGEATYTIPVPTLPGRAGIEPSLAITYDSAQGEGLLGIGFHLQGLSSVDRCPRNVAQDGHIAPVRDAEDDALCLDGQRLVPVDPQPGRAPREYRTFPDSFTRVEADFAESEGWPAERGPKRLRAHGKAGLIYEYGGESSGRVLAQGEAVRSWLLTRLSDRDGNTMAVVYRNDLHAKGYTVEHAPQRITYTRHPTVPASRMVEFTYGPLEAADVRVHYARGMELRRSLSLRSIQMFGPGHVLARELRFGYGHGPATGRLRLEAVRECAGDGTCKPPTRFTWHTAGAAGYTQQQTLVEVPLSERGTLMTMDVSGDGLDDLVTSDMVVEAGTEEPITRWSVALNRSQELTPGFFEAAVTGQEQPHFIDAEPPYQPELGTPLDYDHDGRMDLFLHDVHGQSMTWEVLLSNGDGRFTRRDTGVPRPFTMGMTPAGLRSPDASTHLVDVDGDGMVDLLQCYLSAHEQLWYLHRWTAAAGGFAPHGDRVHALSSYPCHAELHAVDVDADGRVDLVMQELILVGSQVRAGWQYVAFSYELSDGSWTRALTGLRLTPPGDRVFFLDVNGDGLPDAVQSSRDDEQLYTSMNIGAGFAAPVPSLATPTLGAARFVRFASVLDHNADGRQDLLLAMSDGGSESLPAWKVLQATGEVGPGTFEIVHPGLPMGIVLQQDELPTPDHPLTPRVTDVNGDGAQDLLYAFNNQVHVFENVLGQEDLLAAVTDGMNAHAPEDAEYLPNVQIRYDHLIDRARTTEGFEDAPGIPSPEQRTYRPLEQSDEEPCRYPVRCVVGHRRVVSGYVLNNGADRPRTFQVAYRNGRHHRLGRGFLGFGTRIVRDLDTGAGTAEFYDNVTFDGAFQAFPFRGQVQRSWRWSPSLPLDAHSAEPASLELLTTRSYAVVIPTQAGTYFTLSLLEGKSRHQGTFSPGSGKTLEEAVRALEGDLASRMSDTLRTVSDFDLYGNILAEQTQTEGVDLDLSVTRSFDNDPLSWRLGELTRETTCSKAGGETQCRVMHRSYDGRGHVRLERVGGEPFDPEMQLDVWFSRDALGNIHSTRSRDGTGQVRASCTSYDALGLMPYAHRNLEGHQSYTRYDPAVGVLRASVDPNGLVSRWAYDGFGRVTLESLPGRMPTVIRRTWTKDGGAAGNAWNLKIRTASVGGQDETVQLDGLGREVRWWWQALDVGEEQAPRMMQEVAFDARGEHLAWRSLPIVDPAPPGSVQVRETWQYDGMGRVLRHVTPWGAATTHEYIGRDEVITAPGQAVTRIASDPLGRPTAVGDPEGGVSRYTYGPFGGLREVTTPAGAVTLTERDAFGRVRRQVSPDRGVSTAHYDGYGQKISSLDAAGRAVTTRYDTLGRIFRQVDEDGVTEFRWDDAQHGVGQLALVVSPDGHRLRYGFDHLGRPATTTLEIGGESFTSRLSYDLSGRLERIEYPSAPGIGSFAIEREYDPHGRLRALKDAGSGAEFWRATAIDAGNRITGERFGGGTATTLRTFDAARERVSRIETQTAGGPVQQLSYLWNDRRKLVERSDGLHANVERFRYDLLDRLTCAQFGLINAALCERPFTYGPDGNLLQKPGVGAYEYDPAQPHAVVRAGSAFYGYDAVGNQTSRPGATIAYTAFDLPKRIALTSGDTVDFAYDGLQQRVRKTTATQEIASFGEVYERVTDVVTGAVEHRYHVRNDERVVTLVRRSVAQGTRTLHVHVDHLGSIDVLTDGVTGSVAERRSYDAFGAPRHPDWGSGQPPSPHELSSLGFTGHEADLDLGLVNMKGRIYDPKLGRFLTPDPLVPRPLFGQSWNSYSYVLNSPLSLVDPSGFQEQPPATEDGCSQGCTIWVFGPPREPKPPAPPKVVEGNLEDAAGTGSTQAPVDVGTSGVRSGWSPQLPATLQTLGRGDAIARRIMDGVRIGMARMLLESAKLGILGGTSRVYVAYTNLTAAWNGYKESGLPGALDAVNPASQMVQAGVEAYEAAAAEDWEAAGASLFKAGSIGMSILATAVGVGGAITATVGSTAGAAGRAAARAPSLPAYAGGKTSGVLRTTAGDTALLSGYKGPSASMPRGTPGMNGRIKSHVEAHAAAVMREQGMKEGTLYINRVPCSGATGCDAMLPRMLPPDAHLRVVGPNGYDQVFVGLPD

SEQ ID NO: 143 - DNA, 6684 bp, Unknown
  Synthetic
atgtccatgtcggcctcacggagtcagcccgcattccccttcgtgtcggcctcctctccgcgtccgcgccggcgccctccctttccccgagcgctgctcctcctcatcgccgtgctcctcgtcggcgcatgcggcgacgctggcggcccgcttctctggtcgagcagctcccaggccctctgggaaccctccccgatcccgccgctccccccgctcctgtgcctcggccccggcgacggtccctccccctttccgcctgaccttacgcaggggaccaccaccgcggcggggaccctgccagggagcttttcggtcacgagcacgggcgaggcgacgtacacgatcccggtccccacgctgcctggccgtgccggcatcgagccctcgctggcgatcacctacgacagtgcgcagggtgaagggctgctcgggatcggcttccacttgcagggcctctcgtcggtcgatcgctgcccccggaacgtcgcgcaggatggtcacatcgcgccggtccgggatgccgaggacgacgccttgtgcctcgatgggcagcggctcgtccccgtggacccgcagccagggcgtgcgccgcgggaataccgcacgttcccggacagcttcacgcgcgtcgaggccgacttcgcggagagcgaggggtggccggcggagcgtgggccgaagcggctgcgggcgcatggcaaagcggggctgatctacgaatacggtggagaatcatcgggccgggtgctcgcgcaaggggaggcggtgcggtcctggttgctgacgcggctcagcgaccgggatggcaacacgatggcggtggtctaccggaatgacctccacgcgaagggctacaccgtcgagcacgcgccgcagcggatcacctacaccaggcacccgactgtgccggcctcgcgcatggtggagttcacgtacgggccgctggaggcggcggacgtgcgcgtacactatgcccgcgggatggagctgcgccgctcgctgagcttgcgctcgatccagatgttcgggccgggacacgtgctcgcgagggagctgcgcttcggttacgggcatgggccggcgacgggtcgcttgcgactggaggcggttcgggagtgcgcaggtgacgggacgtgcaagccgccgacacgcttcacctggcacacggccggagcggctggatacacgcagcagcagacactggtggaggtgccgctgtcggagcgcggcacgttgatgacgatggacgtcagcggcgatggcctcgacgacctggtgacgtccgacatggtggtggaggccggcacggaagagccgatcacccgctggtcggtcgcgctcaaccggagccaggagctgacgccggggttcttcgaggcggccgtcactgggcaggagcagccgcatttcatcgacgcagagccgccgtaccagccggagctggggacgccgctcgactacgaccacgatggccggatggacctgtttctgcacgatgtgcacgggcagtcgatgacgtgggaggtgctgctgtcgaatggagatgggcggttcacgcggcgggatacgggggtgccgcggccgttcacgatgggcatgacgccggcgggattgcgcagcccggatgcgtcgacccatctggtggatgttgacggtgacgggatggtggacctgctgcagtgctacctgagcgcgcacgagcagctctggtacttgcaccgctggacggcagcggcggggggcttcgcgccgcacggcgatcgggtgcatgcgctgagctcctacccgtgccacgccgagctgcacgcggtcgatgtcgacgcggatgggcgggtggacctggtgatgcaggagctgatcctcgtcgggagccaggtgcgggcggggtggcagtacgtggcgttctcgtacgagctgtccgatggatcgtggacgcgcgcgctgacggggctgcggctcacgccgcctggggaccgggtgttcttcctcgacgtcaacggcgatgggctgcccgatgcggtgcagagcagccgggacgatgagcagctgtacacgtcgatgaatatcggcgcgggattcgcggcgccggtaccgagcctggcgacgccgacgctcggggctgcgaggttcgttcggtttgcgtcggtgctcgatcacaacgcggatgggcgacaagacctgctgctggccatgagcgatgggggatcggagtcgctgcccgcgtggaaggtgctccaggcgacgggggaggtcggtccggggacgttcgagatcgtccatcccgggctgccgatgggcatcgtgctccagcaggacgagctgcccacgcccgaccatccgctcacgccgcgggtcactgacgtgaatggggatggggcgcaggatctgctctatgcgttcaacaaccaggtccatgtgttcgagaacgtgctcggccaggaggacctgctcgcggccgtgaccgacggcatgaatgcgcacgctccggaggacgccgagtacctgcccaacgtgcagatccggtacgaccacctgatcgatcgtgcgcggacgacggagggcttcgaggatgctccagggatcccgtcacccgagcagcgcacctaccggcctctggagcaaagcgatgaggagccctgccgctatccggtgcggtgcgtggtcgggcatcggcgggtggtgagcggctatgtgctcaacaatggcgcggatcggccgcgcaccttccaggtggcctaccgcaatggccgtcaccatcgcctgggccgagggtttctggggttcgggacgcggatcgtgcgtgacctcgataccggcgcggggacggccgagttctacgacaacgtcacgtttgatggcgccttccaggccttccctttccgagggcaggtacagcgctcgtggcgctggagtccgagcttgccgctggacgcgcatagcgcggagccggcgtccctcgagctgctgacgacgcggagctacgcggtggtgatccccacgcaagcggggacgtacttcaccctctcgctgctggagggcaagagccgtcatcagggcacgttctcaccggggagtgggaaaacgctcgaagaagccgtgcgcgctctggaaggagatctcgcctcgcgaatgagcgacacgctccgcaccgtcagcgacttcgacctctacgggaacatcctcgccgagcaaacgcagacggagggcgtcgacctcgacctctcggtgacgcgcagcttcgacaacgacccgctctcctggcgccttggcgagctgacgcgagagacgacgtgcagcaaagcgggcggtgagacgcagtgccgggtgatgcaccggagctatgacgggcgcggccacgttcgcctggagcgcgtcgggggagagcccttcgacccggagatgcagctcgatgtctggttctcgcgggacgcgctgggcaacatccacagcacccggtcacgtgatgggacggggcaggtgcgcgcgagctgcaccagctacgacgcgctgggcttgatgccttatgcccaccgcaacctggagggccaccagagctatacgcgctacgacccggccgtgggcgtgctgcgggcgtcggtggatcccaacggcctggtgagccgctgggcctacgatggcttcgggcgggtgacgctggagagcctccccgggcgcatgcccaccgtcatccggcggacctggacgaaggacggcggagcggctggcaacgcctggaacctgaagatccgcaccgcctcggtggggggccaggacgagaccgtgcagctcgatggtctcgggcgggaggtgcgctggtggtggcaagcgctcgacgtgggggaagagcaagcgccgcggatgatgcaggaggtcgccttcgatgcgcggggcgagcacctcgcgtggcgctcgctgccgatcgtggatcccgcgccaccaggctcggtgcaggtgcgagagacgtggcaatacgacgggatggggcgggtgctccggcacgtcacgccgtggggggcggcgacgacgcacgagtacatcgggcgggacgaggtcatcaccgcgcctgggcaggccgtcacccgaatcgccagcgatccgctcgggaggcccacggcagtgggtgatcccgaaggtggcgtcagccggtacacctacggtcccttcggggggctgcgcgaggtgaccacgcccgctggtgccgtgacgctgaccgagcgggatgcgtttggccgcgtgcgacggcaggtgagcccggaccggggagtctctactgcgcactacgacggttacgggcagaagatctcatcgctcgacgcggcaggacgcgcggtcacgacccgctacgacacgctgggtcggattttcaggcaggtcgacgaagacggcgtcaccgagttccgttgggatgacgcgcagcatggagtgggtcagctcgcgctggtggtcagccccgatgggcatcggctgcgctacggcttcgaccacctcgggcgaccagcgacgacgacgctggagatcggaggggaaagcttcaccagccggctgtcttatgatctgagcggccggctcgagcggatcgagtacccgagcgcgccggggattggcagcttcgccatcgagcgggagtacgatcctcacgggcggctgcgggcgctgaaggatgcggggtcgggggcggagttctggcgagccaccgcgatcgatgcggggaatcgcatcacgggggagcgcttcggtggggggaccgccaccacgctccgcacgttcgacgcggcacgggagcgggtgagtcggatcgagacgcagacggcaggtgggcccgtccagcagctctcctacctctggaacgatcgccgcaagctcgtcgagcgctccgatggcctccacgccaacgtcgagcgctttcgttacgacctgctggaccggctgacgtgcgcgcagttcgggctgatcaatgctgccctctgcgagcgaccgttcacctacggacccgacggcaacctgctccagaagcccggcgtcggtgcctacgagtacgaccccgcgcagccccacgccgtcgtccgagctggtagcgcgttctacggctacgacgccgtcggcaaccagacctcacgacccggcgcgaccatcgcctacaccgcgttcgacctaccgaagcgaatcgcgctcaccagcggcgacaccgtcgacttcgcgtacgacggcctccagcagcgggtgcgcaagaccacggcgacgcaggagatcgcctccttcggcgaggtgtacgagcgcgtgaccgatgtcgtcacgggagccgtcgagcatcgctaccacgtgcgcaacgacgagcgcgtcgtcacgctggtgcggcgctcggtcgcgcaaggcacgcgcacgctgcatgtccatgtcgaccacctcgggtcgatcgatgtgctcaccgacggtgtgaccggcagcgtcgccgagcgccgcagctacgatgccttcggcgcaccgcgccatcccgactggggttcgggtcagcctccgtcaccccacgagctgtcgtcgcttggcttcaccgggcacgaggccgacctcgacctcggcctcgtgaacatgaaggggcgcatctacgaccccaagctcggacggttcctcacgcccgatccgctcgtgccgcggcctctcttcgggcagagctggaatagctattcgtacgtgctaaacagcccgctgtcgctggtcgatcccagtgggtttcaagagcagccacctgcgacagaggacggatgctcgcagggctgcaccatctgggtgttcggtcctccccgcgagccgaagccacctgcgccgcccaaggtcgtcgagggcaacctggaggacgccgctggcactggttcgacccaggcgccggtcgatgtcgggacctccggggtccgtagcggatggagtccgcagctcccggccacgttgcagaccttgggccgtggtgacgccatcgccaggcgcatcatggacggcgtccgcatcgggatggccaggatgctgctggagtccgcaaagctcggcatcctgggcggcaccagccgcgtctacgtcgcctacaccaacctcaccgccgcctggaatggctacaaagagagcgggctccccggcgctctcgacgccgtcaatcccgccagccagatggtccaagccggcgtggaggcctacgaggctgccgccgcagaggactgggaggccgccggcgccagcttgttcaaggccgggtcgatcgggatgtcgatcctggcgacggctgttggcgtcgggggagcgatcactgcgacagtgggctcgacggcaggagcggcggggagggcagccgcaagagccccctcactccctgcatatgctggcggaaaaacgtcgggagtactacggaccaccgcaggcgatacagcactgctgagcggctacaaggggccgtccgcatcgatgcctcgaggaacgccaggcatgaacggacgcatcaagtcgcatgtagaagctcatgcggctgccgtgatgcgagagcaagggatgaaggaaggaaccctgtacatcaatcgagtcccctgctctggcgccaccggatgcgacgcgatgctcccaagaatgctcccaccagatgcacaccttcgcgtggtcggtccgaatggttacgatcaagtttttgtcgggctgcccgactga

SEQ ID NO: 144 - DNA, 2497 bp, Artificial Sequence
  Synthetic
atggccctgtcccgtgcggtttgtggcacctcccgtcaactggctccggttctgggttatctgggttcccgtcaaaaacactccctgccggactacccgtatgatgttccggattacgctggctacccatacgacgtcccagactacgctggctacccatacgacgtcccagactacgctatggacatcgcggatctgcgtaccctgggttacagccagcagcagcaggagaagatcaagccgaaggtgcgcagcaccgtggctcagcaccacgaagccctggtgggccacggtttcacccacgctcacattgtggccctgagccagcacccagccgcgctgggcaccgtggccgtgaaatatcaggatatgattgctgccctgccagaggccacccatgaagctattgtgggcgtgggcaagcagtggagcggtgctcgtgcgctggaggcgctgctgaccgtggctggtgaactgcgtggtccgccgctgcagctggacaccggtcagctgctgaaaatcgcgaaacgtggcggtgtgaccgcggtggaagccgtgcatgcttggcgtaatgctctgaccggtgcgccgctgaacctgaccccgcagcaggtggtggctattgccagcaacaacggcggtaaacaggccctggagaccgtgcagcgcctgctgccggtgctgtgccaggcccatggtctgaccccggagcaggtggtggcgatcgctagcaacatcggcggcaagcaggccctggaaaccgtgcaggcgctgttaccggtgctgtgccaggctcatggcctgaccccggaacaagttgtggctattgccagccatgatggcggtaaacaggctctggaaaccgtgcagcgtctgttgccggtgctgtgccaagcccatggcctgaccccggagcaagttgtggctattgcgagccatgatggcggcaagcaggcgctggaaaccgttcagcgcctgttaccggtgctgtgccaagctcatggtctgaccccggaacaggtggtggccattgcttcccatgatggcggtaaacaggccctggaaaccgttcagcgtctgcttccggtgctgtgccaggcccatgggctgaccccggaacaagtggttgctattgccagccacgatggcggcaagcaggctctggagaccgttcagcgcctgcttccggtgctgtgccaggcccatggcttaaccccggaacaagttgttgctattgctagtcatgatggcggtaaacaggcgctggagaccgttcagcgtctgttaccggtgctgtgccaggcgcatggcttaaccccggagcaggttgttgccattgcctccaatatcggcggcaagcaggctctggaaaccgttcaggccctgttgccggtgctgtgccaggcccatggactgaccccgcagcaagttgttgccattgccagcaatggcggtggcaaacaggcgctggaaactgttcagcgcctgctcccggtgctgtgccaagcgcatggtctgaccccgcagcaagtggttgctattgctagcaatggtggcggtcgtccggcgctggaaagcattgtggctcagctgagccgtccagacccggccctggcggctctgaccaacgatcacctggtggcgctggcttgcctgggcggtcgtccggccctggatgcggtgaagaaaggcctgggtggatccggcagctacgccctgggtccgtatcagattagcgccccgcagctgccagcttacaatggtcagaccgtgggtaccttctactatgtgaacgacgcgggcggtctggagagcaaggtgtttagcagcggcggtccaaccccgtacccaaactatgccaatgccggtcatgtggagggtcagagcgccctgttcatgcgtgataacggcatcagcgagggtctggtgttccacaacaacccggaaggcacctgcggtttttgcgtgaacatgaccgagaccctgctgccggaaaacgcgaaaatgaccgtggtgccgccggaaggttctggcggctcaactaatctgagcgacatcattgagaaggagactgggaaacagctggtcattcaggagtccatcctgatgctgcctgaggaggtggaggaagtgatcggcaacaagccagagtctgacatcctggtgcacaccgcctacgacgagtccacagatgagaatgtgatgctgctgacctctgacgcccccgagtataagccttgggccctggtcatccaggattctaacggcgagaataagatcaagatgctgtgataaaccacgatcgttatgctgatcataccctaatgatcccagcaagataatgtcctgtcttctaagatgtgcatcaagcctggtacatactgaaaaccctataaggtcctggataatttttgtttgattattcattgaagaaacatttattttccaattgtgtgaagtttttgactgttaataaaagaatctgtcaaccatcaaa

SEQ ID NO: 145 - DNA, 2281 bp, Artificial Sequence
  Synthetic
tccgttctgaccccgctgctgctgcgtggcctgaccggctccgctcgtcgtctgccagttccgcgtgcgaaaatccattccctggactacaaagaccatgacggtgattataaagatcatgacatcgattacaaggatgacgatgacaagatggacatcgcggatctgcgtaccctgggttacagccagcagcagcaggagaagatcaagccaaaggtgcgcagcaccgtggcccagcaccatgaagctctggtgggtcacggcttcacccacgcgcacatcgtggctctgagccagcacccagccgcgctgggtaccgtggccgtgaaatatcaggacatgattgctgccctgccagaggctacccatgaagcgattgtgggtgtgggcaagagaggagccggtgctcgtgcgctggaggccctgctgaccgtggccggtgaactgcgtggcccgccgctgcagctggataccggccagctgctgaaaatcgcgaaacgtggcggtgtgaccgctgtggaagctgtgcatgcctggcgtaatgctctgaccggtgccccgctgaacctgaccccgcagcaggtggtggctattgccagcaacaacggcggtaaacaggctctggaaaccgtgcagcgcctgctgccggtgctgtgccaggctcatggtctgaccccggagcaggtggtggcgatcgctagcaacatcggcggcaagcaggctctggagaccgttcaggccctgttaccggtgctgtgccaagcccatggtctgaccccgcagcaagttgtggctattgccagcaatggcggtggcaaacaggcgctggagaccgtgcagcgtctgttgccggtgctgtgccaagcccatgggctgaccccgcagcaagtggttgccatcgccagcaacaacggtggcaagcaggccctggagaccgttcagcgcctgttaccggtgctgtgccaggcccatggcttaaccccgcagcaagttgtggccatcgctagcaacaacggtggcaaacaggctctggagactgttcagcgtctgcttccggtgctgtgccaagcgcatggcctgaccccggaacaagttgttgctattgccagccatgatggtggcaagcaggcgctggaaaccgttcagcgcctgcttccggtgctgtgccaggcgcatggattaaccccgcagcaagtggtggccatcgccagcaatggtggcggtaaacaggccctggaaaccgttcagcgtctgttaccggtgctgtgccaggcccatggattaaccccggaacaagttgtggctattgcgtccaatatcggcggcaagcaggcgctggaaactgtgcaggctctgctcccggtgctgtgccaggcccatgggttaaccccgcagcaggttgttgccattgcgagcaacggcggtggcaaacaggctctggagacggttcagcgcctgctcccggtgctgtgccaggcccatggtttaaccccgcagcaggtggttgctattgctagcaatggcggcggcaagcaggcgctggaaacggtgcagcgtctgctaccggtgctgtgccaggcacatggccttaccccgcagcaagttgtggccattgctagcaatggcggtggccgtccggccctggaaagcattgtggcgcagctgagccgtccagacccggccctggcggctctgaccaatgatcacctggtggccctggcctgcctgggtggccgtccggctctggatgccgtgaagaaaggtctgggcggatccgccattccagtgaagcgcggcgctaccggtgaaaccaaagtgtttaccggtaacagcaacagcccgaagagcccgaccaaaggcggttgctctggcggctcaactaatctgagcgacatcattgagaaggagactgggaaacagctggtcattcaggagtccatcctgatgctgcctgaggaggtggaggaagtgatcggcaacaagccagagtctgacatcctggtgcacaccgcctacgacgagtccacagatgagaatgtgatgctgctgacctctgacgcccccgagtataagccttgggccctggtcatccaggattctaacggcgagaataagatcaagatgctgtgataaggggtctttgtcctctgtactgtctctctccttgcccctaacccaaaaagcttcatttttctgtgtaggctgcacaagagccttgattgaagatatattctttctgaacagtatttaaggtttccaataaaatgtacacccctcagaa

SEQ ID NO: 146 - DNA, 2331 bp, Artificial Sequence
  Synthetic
gacatcgcggatctgcgtaccctgggttacagccagcagcagcaggagaagatcaagccaaaggtgcgcagcaccgtggcccagcaccatgaagctctggtgggtcacggcttcacccacgcgcacatcgtggctctgagccagcacccagccgcgctgggtaccgtggccgtgaaatatcaggacatgattgctgccctgccagaggctacccatgaagcgattgtgggtgtgggcaagcagtggagcggtgctcgtgcgctggaggccctgctgaccgtggccggtgaactgcgtggcccgccgctgcagctggataccggccagctgctgaaaatcgcgaaacgtggcggtgtgaccgctgtggaagctgtgcatgcctggcgtaatgctctgaccggtgccccgctgaacctgaccccggaacaggtggttgccatcgcatccaataatggtggtaaacaagctctggagaccgttcaagccctgctgccagtgctgtgccaggctcatggtctgaccccgcagcaagttgtggctattgccagcaacatcggcggcaagcaggccctggagaccgtgcagcgtctgctgccggtgctgtgccaggcccatggcctgaccccgcagcaagtggttgctatcgccagcaacaacggcggtaaacaggctctggaaaccgtgcagcgcctgttaccggtgctgtgccaagcccatggtctgaccccggagcaggtggtggcgattgctagcaacggcggtggcaagcaggctctggagaccgttcaggccctgcttccggtgctgtgccaagcgcatggcctgaccccggaacaagttgttgccattgccagcaatggtggcggtaaacaggcgctggaaaccgtgcaggctctgttaccggtgctgtgccaggcccatgggctgaccccggagcaagtggtggctattgcgagcaatggcggtggcaagcaggccctggaaaccgtgcaggcgctgttgccggtgctgtgccaagcccatggattaaccccggaacaagtggtggcgatcgctagcaacaacggtggcaaacaggcgctggagaccgttcagcgtctgttaccggtgctgtgccaggcgcatggcttaaccccggaacaggttgttgcgattgccagcaacattggtggcaagcaggctctggaaaccgttcaggccctgctcccggtgctgtgccaggcccatggtttaaccccggaacaggtggtggccattgccagcaacggtggcggtaaacaggccctggagaccgttcagcgcctgctaccggtgctgtgccaggcccatggactgaccccggagcaagttgttgccattgctagcaacaacggcggcaagcaggcgctggagaccgtgcaggctctgcttccggtgctgtgccaggcccatgggttaaccccggagcaggttgtggccatcgccagccacgacggcggtaaacaggccctggaaaccgttcaggcgctgctaccggtgctgtgccaggcacatggcttaaccccggagcaggtggttgccatcgcctccaatggcggtggcaagcaggctctggaaacggtgcaggccctgctgccggtgctgtgccaagcccatgggttgaccccggaacaagtggtggctattgctagccacgacggtggcaaacaggctctggagactgttcagcgtctgcttccggtgctgtgccaggctcatggcttaaccccgcagcaagttgttgctattgcctccaatattggtggcaagcaggcgctggaaaccgttcagcgcctgctgccggtgctgtgccaggctcatgggcttaccccggaacaagttgtggccattgcctcccatgatggtggcaaacaggcgctggaaactgtgcaggctctgctcccggtgctgtgccaggctcatggattaaccccgcagcaagtggtggccattgctagccacgatggtggcaagcaggccctggagacggttcagcgtctgctcccggtgctgtgccaggcccatgggctaaccccgcagcaggttgttgctattgccagtcatgatggtggcaaacaggctctggaaactgtgcagcgcctgctaccggtgctgtgccaggctcacggtctgaccccgcagcaggtggtggcaatcgcaagcaacggtggtggtcgtccggcactggaaagcattgtggcgcagctgagccgtccagacccggccctggcggctctgaccaatgatcacctggtggccctggcctgcctgggtggccgtccggctctggatgccgtgaagaaaggtctgggc

SEQ ID NO: 147 - protein, 777 aa, Artificial Sequence
  Synthetic
DIADLRTLGYSQQQQEKIKPKVRSTVAQHHEALVGHGFTHAHIVALSQHPAALGTVAVKYQDMIAALPEATHEAIVGVGKQWSGARALEALLTVAGELRGPPLQLDTGQLLKIAKRGGVTAVEAVHAWRNALTGAPLNLTPEQVVAIASNNGGKQALETVQALLPVLCQAHGLTPQQVVAIASNIGGKQALETVQRLLPVLCQAHGLTPQQVVAIASNNGGKQALETVQRLLPVLCQAHGLTPEQVVAIASNGGGKQALETVQALLPVLCQAHGLTPEQVVAIASNGGGKQALETVQALLPVLCQAHGLTPEQVVAIASNGGGKQALETVQALLPVLCQAHGLTPEQVVAIASNNGGKQALETVQRLLPVLCQAHGLTPEQVVAIASNIGGKQALETVQALLPVLCQAHGLTPEQVVAIASNGGGKQALETVQRLLPVLCQAHGLTPEQVVAIASNNGGKQALETVQALLPVLCQAHGLTPEQVVAIASHDGGKQALETVQALLPVLCQAHGLTPEQVVAIASNGGGKQALETVQALLPVLCQAHGLTPEQVVAIASHDGGKQALETVQRLLPVLCQAHGLTPQQVVAIASNIGGKQALETVQRLLPVLCQAHGLTPEQVVAIASHDGGKQALETVQALLPVLCQAHGLTPQQVVAIASHDGGKQALETVQRLLPVLCQAHGLTPQQVVAIASHDGGKQALETVQRLLPVLCQAHGLTPQQVVAIASNGGGRPALESIVAQLSRPDPALAALTNDHLVALACLGGRPALDAVKKGLG

SEQ ID NO: 148 - DNA, 2025 bp, Artificial Sequence
  Synthetic
gacatcgcggatctgcgtaccctgggttacagccagcagcagcaggagaagatcaagccgaaggtgcgcagcaccgtggctcagcaccacgaagccctggtgggccacggtttcacccacgctcacattgtggccctgagccagcacccagccgcgctgggcaccgtggccgtgaaatatcaggatatgattgctgccctgccagaggccacccatgaagctattgtgggcgtgggcaagcagtggagcggtgctcgtgcgctggaggcgctgctgaccgtggctggtgaactgcgtggtccgccgctgcagctggacaccggtcagctgctgaaaatcgcgaaacgtggcggtgtgaccgcggtggaagccgtgcatgcttggcgtaatgctctgaccggtgcgccgctgaacctgaccccggaacaagtggttgctatcgcatcccatgacggcggtaaacaagccctggagaccgttcaagccctgctgccagtgctgtgccaggctcatggtctgaccccgcagcaggtggtggctattgccagcaatggcggtggcaagcaggcgctggagaccgtgcagcgtctgctgccggtgctgtgccaagcccatggcctgaccccgcagcaagttgtggctatcgccagcaacattggtggcaaacaggccctggaaaccgtgcagcgcctgttaccggtgctgtgccaggcccatggtctgaccccggagcaggtggtggcgatcgctagcaacaacggtggcaagcaggctctggaaaccgtgcaggccctgcttccggtgctgtgccaggcccatgggctgaccccggaacaagttgtggctattgccagccacgacggtggcaaacaggcgctggaaaccgtgcaggctctgttaccggtgctgtgccaagcgcatggcctgaccccggaacaggtggtggctattgctagccacgatggtggcaagcaggccctggagaccgttcaggcgctgttgccggtgctgtgccaggcgcatggcttaaccccggaacaagttgttgcgattgctagcaacggtggcggtaaacaggctctggagaccgttcagcgtctgttaccggtgctgtgccaggcacatggcctgaccccggagcaagttgttgccattgccagcaacatcggcggcaagcaggctctggagaccgtgcaggccctgctcccggtgctgtgccaggcccatggcttaaccccggagcaagttgtggccattgccagcaacaacggcggtaaacaggcgctggagaccgttcagcgcctgctaccggtgctgtgccaggctcatggcttgaccccggaacaggttgttgcgattgcgagccatgatggcggcaagcaggcgctggaaaccgttcaggctctgcttccggtgctgtgccaggcccatggattaaccccggagcaggttgttgctattgccagccatgatggcggtaaacaggccctggagaccgtgcaggcgctgctaccggtgctgtgccaggctcatgggctgaccccggagcaagtggttgctatcgcgagcaacaatggcggcaagcaggctctggaaacggtgcaggccctgctgccggtgctgtgccaggcccatgggttaaccccggaacaagtggtggccatcgctagcaacggcggtggcaaacaggccctggagactgttcagcgtctgcttccggtgctgtgccaggcccatgggctaaccccgcagcaagtggttgccattgccagcaatggcggcggcaagcaggctctggaaactgtgcagcgcctgctgccggtgctgtgccaggctcacggtctgaccccgcaacaggtggtggcaatcgcaagcaatggtggtggtcgtccggcactggagagcattgtggctcagctgagccgtccagacccggccctggcggctctgaccaacgatcacctggtggcgctggcttgcctgggcggtcgtccggccctggatgcggtgaagaaaggcctgggt

SEQ ID NO: 149 - protein, 675 aa, Artificial Sequence
  Synthetic
DIADLRTLGYSQQQQEKIKPKVRSTVAQHHEALVGHGFTHAHIVALSQHPAALGTVAVKYQDMIAALPEATHEAIVGVGKQWSGARALEALLTVAGELRGPPLQLDTGQLLKIAKRGGVTAVEAVHAWRNALTGAPLNLTPEQVVAIASHDGGKQALETVQALLPVLCQAHGLTPQQVVAIASNGGGKQALETVQRLLPVLCQAHGLTPQQVVAIASNIGGKQALETVQRLLPVLCQAHGLTPEQVVAIASNNGGKQALETVQALLPVLCQAHGLTPEQVVAIASHDGGKQALETVQALLPVLCQAHGLTPEQVVAIASHDGGKQALETVQALLPVLCQAHGLTPEQVVAIASNGGGKQALETVQRLLPVLCQAHGLTPEQVVAIASNIGGKQALETVQALLPVLCQAHGLTPEQVVAIASNNGGKQALETVQRLLPVLCQAHGLTPEQVVAIASHDGGKQALETVQALLPVLCQAHGLTPEQVVAIASHDGGKQALETVQALLPVLCQAHGLTPEQVVAIASNNGGKQALETVQALLPVLCQAHGLTPEQVVAIASNGGGKQALETVQRLLPVLCQAHGLTPQQVVAIASNGGGKQALETVQRLLPVLCQAHGLTPQQVVAIASNGGGRPALESIVAQLSRPDPALAALTNDHLVALACLGGRPALDAVKKGLG

SEQ ID NO: 150 - DNA, 2025 bp, Artificial Sequence
  Synthetic
gacatcgcggatctgcgtaccctgggttacagccagcagcagcaggagaagatcaagccaaaggtgcgcagcaccgtggcccagcaccatgaagctctggtgggtcacggcttcacccacgcgcacatcgtggctctgagccagcacccagccgcgctgggtaccgtggccgtgaaatatcaggacatgattgctgccctgccagaggctacccatgaagcgattgtgggtgtgggcaagcagtggagcggtgctcgtgcgctggaggccctgctgaccgtggccggtgaactgcgtggcccgccgctgcagctggataccggccagctgctgaaaatcgcgaaacgtggcggtgtgaccgctgtggaagctgtgcatgcctggcgtaatgctctgaccggtgccccgctgaacctgaccccggaacaagtggttgccatcgcatccaatatcggtggtaaacaagccctggagaccgttcaagccctgctgccagtgctgtgccaggctcatggtctgaccccgcagcaggtggtggccattgcgagcaacaatggcggcaagcaggcgctggagaccgtgcagcgtctgctgccggtgctgtgccaagcccatggcctgaccccgcagcaagtggttgctatcgccagcaacattggcggtaaacaggccctggaaaccgtgcagcgcctgttaccggtgctgtgccaggcccatggtctgaccccggagcaggtggtggcgatcgctagcaacatcggcggcaagcaggctctggaaaccgtgcaggccctgcttccggtgctgtgccaggcccatgggctgaccccggaacaagttgtggctattgccagccatgatggcggtaaacaggcgctggaaaccgtgcaggctctgttaccggtgctgtgccaagcgcatggcctgaccccggaacaggtggtggctattgcgagcaatggcggtggcaagcaggccctggagaccgttcaggcgctgttgccggtgctgtgccaggcgcatggcttaaccccggaacaagttgttgcgatcgctagcaacaacggtggcaaacaggctctggagaccgttcagcgtctgttaccggtgctgtgccaggcacatggcctgaccccggagcaagttgttgccattgccagccacgatggtggcaagcaggctctggagaccgtgcaggccctgctcccggtgctgtgccaggcccatggcttaaccccggagcaagttgtggctatcgccagcaacggtggcggtaaacaggcgctggagaccgttcagcgcctgctaccggtgctgtgccaggctcatggcttgaccccggaacaggttgttgccattgcgtccaatatcggcggcaagcaggcgctggaaaccgttcaggctctgcttccggtgctgtgccaggcccatggattaaccccggagcaggttgtggcgattgcgagcaacggcggtggcaaacaggccctggagaccgtgcaggcgctgctaccggtgctgtgccaggctcatgggctgaccccggagcaagtggttgctattgctagcaatggcggcggcaagcaggctctggaaacggtgcaggccctgctgccggtgctgtgccaggcccatgggttaaccccggaacaagtggtggccatcgcttccaatattggcggtaaacaggccctggagactgttcagcgtctgcttccggtgctgtgccaggcccatgggctaaccccgcagcaagttgttgctattgcctccaatggcggtggcaagcaggctctggaaactgtgcagcgcctgctgccggtgctgtgccaggctcacggcctgaccccgcagcaagttgtggcaatcgcaagcaatggtggtggtcgtccggctctggagagcattgtggcgcagctgagccgtccagacccggccctggcggctctgaccaatgatcacctggtggccctggcctgcctgggtggccgtccggctctggatgccgtgaagaaaggtctgggc

SEQ ID NO: 151 - protein, 675 aa, Artificial Sequence
  Synthetic
DIADLRTLGYSQQQQEKIKPKVRSTVAQHHEALVGHGFTHAHIVALSQHPAALGTVAVKYQDMIAALPEATHEAIVGVGKQWSGARALEALLTVAGELRGPPLQLDTGQLLKIAKRGGVTAVEAVHAWRNALTGAPLNLTPEQVVAIASNIGGKQALETVQALLPVLCQAHGLTPQQVVAIASNNGGKQALETVQRLLPVLCQAHGLTPQQVVAIASNIGGKQALETVQRLLPVLCQAHGLTPEQVVAIASNIGGKQALETVQALLPVLCQAHGLTPEQVVAIASHDGGKQALETVQALLPVLCQAHGLTPEQVVAIASNGGGKQALETVQALLPVLCQAHGLTPEQVVAIASNNGGKQALETVQRLLPVLCQAHGLTPEQVVAIASHDGGKQALETVQALLPVLCQAHGLTPEQVVAIASNGGGKQALETVQRLLPVLCQAHGLTPEQVVAIASNIGGKQALETVQALLPVLCQAHGLTPEQVVAIASNGGGKQALETVQALLPVLCQAHGLTPEQVVAIASNGGGKQALETVQALLPVLCQAHGLTPEQVVAIASNIGGKQALETVQRLLPVLCQAHGLTPQQVVAIASNGGGKQALETVQRLLPVLCQAHGLTPQQVVAIASNGGGRPALESIVAQLSRPDPALAALTNDHLVALACLGGRPALDAVKKGLG

SEQ ID NO: 152 - DNA, 2331 bp, Artificial Sequence
  Synthetic
gacatcgcggatctgcgtaccctgggttacagccagcagcagcaggagaagatcaagccaaaggtgcgcagcaccgtggcccagcaccatgaagctctggtgggtcacggcttcacccacgcgcacatcgtggctctgagccagcacccagccgcgctgggtaccgtggccgtgaaatatcaggacatgattgctgccctgccagaggctacccatgaagcgattgtgggtgtgggcaagcagtggagcggtgctcgtgcgctggaggccctgctgaccgtggccggtgaactgcgtggcccgccgctgcagctggataccggccagctgctgaaaatcgcgaaacgtggcggtgtgaccgctgtggaagctgtgcatgcctggcgtaatgctctgaccggtgccccgctgaacctgaccccggaacaagtggtggctatcgcgtcccatgatggtggtaaacaggctctggagaccgtgcaagctctgctgccagtgctgtgccaggcccatggtctgaccccgcagcaggtggtggctattgccagcaatggcggtggcaagcaggcgctggagaccgtgcagcgtctgctgccggtgctgtgccaggctcatggcctgaccccgcagcaagttgtggctattgccagcaacggtggcggtaaacaggccctggagaccgtgcagcgcctgttaccggtgctgtgccaagcccatggcctgaccccggagcaggtggtggcgatcgctagcaacatcggcggcaagcaggctctggaaaccgtgcaggccctgcttccggtgctgtgccaggcccatggcttaaccccggaacaggttgttgctattgccagcaacaacggcggtaaacaggcgctggaaaccgtgcaggctctgttaccggtgctgtgccaggcccatgggctgaccccggaacaagttgtggctattgcgagccatgatggcggcaagcaggccctggaaaccgtgcaggcgctgttgccggtgctgtgccaagcccatggattaaccccggaacaagttgttgcgatcgctagcaacattggcggtaaacaggctctggaaaccgttcagcgtctgttaccggtgctgtgccaggcgcatggtctgaccccggaacaggttgtggccattgcctccaatggcggtggcaagcaggctctggagaccgttcaggccctgctcccggtgctgtgccaagcgcatggcctgaccccggaacaggtggtggctatcgccagcaacattggtggcaaacaggcgctggagaccgttcagcgcctgctaccggtgctgtgccaggcacatggtctgaccccggagcaagttgtggccattgctagccacgatggtggcaagcaggcgctggaaaccgttcaggctctgcttccggtgctgtgccaggcccatggtttaaccccggaacaagtggttgccattgcgtccaatggtggcggtaaacaggccctggaaaccgttcaggcgctgctaccggtgctgtgccaggctcatgggctgaccccggagcaagtggttgctattgcttcccatgatggcggcaagcaggctctggaaacggtgcaggccctgctgccggtgctgtgccaagcccatgggttaaccccggaacaggtggttgcgattgctagccacgacggcggtaaacaggccctggaaacggttcagcgtctgcttccggtgctgtgccaggcccatggacttaccccgcagcaggttgtggcgattgcctccaatggcggtggcaagcaggctctggaaactgtgcagcgcctgctgccggtgctgtgccaggctcatggtttaaccccggagcaggttgttgccatcgccagccacgacggtggcaaacaggcgctggaaactgtgcaggctctgctcccggtgctgtgccaggctcatggacttaccccggagcaggtggttgccattgctagcaacattggtggcaagcaggccctggagactgttcaggcgctgttaccggtgctgtgccaggcccatgggttaaccccggagcaagttgttgccattgcctccaatattggtggcaaacaggctctggagactgttcaggccctgctgccggtgctgtgccaggctcacggtctgaccccgcagcaagtggtggcaatcgcaagcaatggtggtggtcgtccggctctggagagcattgtggcgcagctgagccgtccagacccggccctggcggctctgaccaatgatcacctggtggccctggcctgcctgggtggccgtccggctctggatgccgtgaagaaaggtctgggc

SEQ ID NO: 153 - DNA, 2229 bp, Artificial Sequence
  Synthetic
gacatcgcggatctgcgtaccctgggttacagccagcagcagcaggagaagatcaagccaaaggtgcgcagcaccgtggcccagcaccatgaagctctggtgggtcacggcttcacccacgcgcacatcgtggctctgagccagcacccagccgcgctgggtaccgtggccgtgaaatatcaggacatgattgctgccctgccagaggctacccatgaagcgattgtgggtgtgggcaagcagtggagcggtgctcgtgcgctggaggccctgctgaccgtggccggtgaactgcgtggcccgccgctgcagctggataccggccagctgctgaaaatcgcgaaacgtggcggtgtgaccgctgtggaagctgtgcatgcctggcgtaatgctctgaccggtgccccgctgaacctgaccccggaacaagtggttgcgattgcgtcccatgatggtggtaaacaagccctggagaccgttcaagctctgctgccagtgctgtgccaggctcatggtctgaccccgcagcaggtggtggctattgccagccatgatggcggcaagcaggctctggagaccgtgcagcgtctgctgccggtgctgtgccaagcccatggcctgaccccgcagcaagttgtggctattgccagcaacggcggtggcaaacaggcgctggaaaccgtgcagcgcctgttaccggtgctgtgccaagcgcatggtctgaccccggagcaggtggtggccatcgctagcaacaacggtggcaagcaggccctggaaaccgtgcaggcgctgttgccggtgctgtgccaggcccatggcttaaccccggaacaagtggtggccattgcgagcaatggtggcggtaaacaggctctggaaaccgtgcaggccctgcttccggtgctgtgccaggcccatgggctgaccccggaacaagttgtggctatcgccagcaacatcggcggcaagcaggcgctggagaccgttcaggctctgttaccggtgctgtgccaggcgcatggcctgaccccggaacaggtggtggcgatcgctagcaacattggcggtaaacaggccctggagaccgttcagcgcctgctcccggtgctgtgccaggcccatggtctgaccccggaacaggttgttgctattgccagcaacaacggcggcaagcaggccctggagaccgtgcaggcgctgctaccggtgctgtgccaggcccatggactgaccccggagcaggttgtggccatcgcgtccaatggcggtggcaaacaggctctggagaccgttcagcgtctgttaccggtgctgtgccaggcacatggcctgaccccggagcaagttgttgccatcgctagcaacattggtggcaagcaggcgctggaaaccgttcagcgcctgctaccggtgctgtgccaggctcatggcttaaccccggagcaggttgtcgccattgccagcaacaatggtggcaaacaggctctggaaactgtgcaggccctgctaccggtgctgtgccaggcccatgggttaaccccggaacaggttgtggccattgcctccaataacggtggcaagcaggcgctggaaacggtgcaggctctgcttccggtgctgtgccaggctcatgggctgaccccggagcaagtggttgctattgcgtccaacattggtggcaaacaggccctggaaaccgttcaggcgctgctcccggtgctgtgccaggcccatgggctaaccccggaacaggtggttgccattgcctccaacaatggtggcaagcaggccctggaaacggttcagcgtctgcttccggtgctgtgccaggcccatgggcttaccccgcagcaagttgttgctatcgccagcaatattggtggcaaacaggctctggaaacggtgcagcgcctgctaccggtgctgtgccaggctcatggtttaaccccgcagcaggtggttgcgattgcctccaacaacggtggcaagcaggcgctggaaactgttcagcgtctgctcccggtgctgtgccaggctcacggcctgaccccgcagcaagtggtggctatcgcctccaacggtggtggtcgcccggctctggaaagcattgtggcgcagctgagccgtccagacccggccctggcggctctgaccaatgatcacctggtggccctggcctgcctgggtggccgtccggctctggatgccgtgaagaaaggtctgggc

SEQ ID NO: 154 - protein, 743 aa, Artificial Sequence
  Synthetic
DIADLRTLGYSQQQQEKIKPKVRSTVAQHHEALVGHGFTHAHIVALSQHPAALGTVAVKYQDMIAALPEATHEAIVGVGKQWSGARALEALLTVAGELRGPPLQLDTGQLLKIAKRGGVTAVEAVHAWRNALTGAPLNLTPEQVVAIASHDGGKQALETVQALLPVLCQAHGLTPQQVVAIASHDGGKQALETVQRLLPVLCQAHGLTPQQVVAIASNGGGKQALETVQRLLPVLCQAHGLTPEQVVAIASNNGGKQALETVQALLPVLCQAHGLTPEQVVAIASNGGGKQALETVQALLPVLCQAHGLTPEQVVAIASNIGGKQALETVQALLPVLCQAHGLTPEQVVAIASNIGGKQALETVQRLLPVLCQAHGLTPEQVVAIASNNGGKQALETVQALLPVLCQAHGLTPEQVVAIASNGGGKQALETVQRLLPVLCQAHGLTPEQVVAIASNIGGKQALETVQRLLPVLCQAHGLTPEQVVAIASNNGGKQALETVQALLPVLCQAHGLTPEQVVAIASNNGGKQALETVQALLPVLCQAHGLTPEQVVAIASNIGGKQALETVQALLPVLCQAHGLTPEQVVAIASNNGGKQALETVQRLLPVLCQAHGLTPQQVVAIASNIGGKQALETVQRLLPVLCQAHGLTPQQVVAIASNNGGKQALETVQRLLPVLCQAHGLTPQQVVAIASNGGGRPALESIVAQLSRPDPALAALTNDHLVALACLGGRPALDAVKKGLG

SEQ ID NO: 155 - DNA, 2229 bp, Artificial Sequence
  Synthetic
gacatcgcggatctgcgtaccctgggttacagccagcagcagcaggagaagatcaagccaaaggtgcgcagcaccgtggcccagcaccatgaagctctggtgggtcacggcttcacccacgcgcacatcgtggctctgagccagcacccagccgcgctgggtaccgtggccgtgaaatatcaggacatgattgctgccctgccagaggctacccatgaagcgattgtgggtgtgggcaagcagtggagcggtgctcgtgcgctggaggccctgctgaccgtggccggtgaactgcgtggcccgccgctgcagctggataccggccagctgctgaaaatcgcgaaacgtggcggtgtgaccgctgtggaagctgtgcatgcctggcgtaatgctctgaccggtgccccgctgaacctgaccccggaacaggtggtggcaatcgcaagcaataatggtggtaaacaggctctggaaaccgtgcaagctctgctgccagttctgtgccaggctcatggtctgaccccgcagcaggtggtggctattgccagccatgatggcggcaagcaggccctggagaccgtgcagcgtctgctgccggtgctgtgccaggcccatggcctgaccccgcagcaagttgtggctattgccagcaacggcggtggcaaacaggctctggagaccgtgcagcgcctgttaccggtgctgtgccaagcccatggtctgaccccggagcaggtggtggcgatcgctagcaacattggtggcaagcaggccctggaaaccgtgcaggcgctgttgccggtgctgtgccaagcccatgggctgaccccggaacaagttgttgccattgccagcaacaatggtggcaaacaggctctggaaactgtgcaggccctgcttccggtgctgtgccaggcccatggattaaccccggaacaagttgtggctattgcgagcaatggcggcggcaagcaggcgctggaaaccgtgcaggctctgttaccggtgctgtgccaggcgcatggcctgaccccggagcaagtggtggccatcgctagcaacattggcggtaaacaggcgctggagaccgttcagcgtctgttaccggtgctgtgccaggcacatggccttaccccggaacaagttgtggccattgccagcaacatcggcggcaagcaggccctggaaacggtgcaggcgctgctcccggtgctgtgccaggcccatgggttaaccccggaacaagtggttgctattgctagccatgatggcggtaaacaggccctggagaccgttcagcgcctgctaccggtgctgtgccaggcccatggtttaaccccggaacaggttgttgcgattgctagccacgatggcggcaagcaggctctggagaccgttcaggccctgctcccggtgctgtgccaggcccatgggcttaccccggagcaagttgttgctattgcctccaatattggcggtaaacaggcgctggaaaccgttcaggctctgcttccggtgctgtgccaggctcatggcctcaccccggaacaagttgtggcgattgcgtcccatgatggcggcaagcaggccctggaaactgtgcaggcgctgctaccggtgctgtgccaggcccatgggctaaccccggaacaggtggttgcgattgctagcaacaacggcggtaaacaggctctggagactgttcagcgtctgcttccggtgctgtgccaggctcatgggctgaccccgcagcaagtggttgctattgccagcaatggcggtggcaagcaggcgctggagactgttcagcgcctgctcccggtgctgtgccaggctcatggtttaaccccggagcaggttgtggcgatcgccagcaatggtggcggtaaacaggctctggaaacggtgcaggccctgctcccggtgctgtgccaggctcatggactgaccccggagcaagttgttgccattgcgtcccacgacggcggcaagcaggcgctggagacggtgcaggctctgctcccggtgctgtgccaggctcacggtctgaccccgcaacaggtggtggcaatcgcaagcaacggtggtggtcgtccggcactggagagcattgtggcgcagctgagccgtccagacccggccctggcggctctgaccaatgatcacctggtggccctggcctgcctgggtggccgtccggctctggatgccgtgaagaaaggtctgggc

SEQ ID NO: 156 - protein, 743 aa, Artificial Sequence
  Synthetic
DIADLRTLGYSQQQQEKIKPKVRSTVAQHHEALVGHGFTHAHIVALSQHPAALGTVAVKYQDMIAALPEATHEAIVGVGKQWSGARALEALLTVAGELRGPPLQLDTGQLLKIAKRGGVTAVEAVHAWRNALTGAPLNLTPEQVVAIASNNGGKQALETVQALLPVLCQAHGLTPQQVVAIASHDGGKQALETVQRLLPVLCQAHGLTPQQVVAIASNGGGKQALETVQRLLPVLCQAHGLTPEQVVAIASNIGGKQALETVQALLPVLCQAHGLTPEQVVAIASNNGGKQALETVQALLPVLCQAHGLTPEQVVAIASNGGGKQALETVQALLPVLCQAHGLTPEQVVAIASNIGGKQALETVQRLLPVLCQAHGLTPEQVVAIASNIGGKQALETVQALLPVLCQAHGLTPEQVVAIASHDGGKQALETVQRLLPVLCQAHGLTPEQVVAIASHDGGKQALETVQALLPVLCQAHGLTPEQVVAIASNIGGKQALETVQALLPVLCQAHGLTPEQVVAIASHDGGKQALETVQALLPVLCQAHGLTPEQVVAIASNNGGKQALETVQRLLPVLCQAHGLTPQQVVAIASNGGGKQALETVQRLLPVLCQAHGLTPEQVVAIASNGGGKQALETVQALLPVLCQAHGLTPEQVVAIASHDGGKQALETVQALLPVLCQAHGLTPQQVVAIASNGGGRPALESIVAQLSRPDPALAALTNDHLVALACLGGRPALDAVKKGLG

SEQ ID NO: 157 - DNA, 1821 bp, Artificial Sequence
  Synthetic
gacatcgcggatctgcgtaccctgggttacagccagcagcagcaggagaagatcaagccaaaggtgcgcagcaccgtggcccagcaccatgaagctctggtgggtcacggcttcacccacgcgcacatcgtggctctgagccagcacccagccgcgctgggtaccgtggccgtgaaatatcaggacatgattgctgccctgccagaggctacccatgaagcgattgtgggtgtgggcaagcagtggagcggtgctcgtgcgctggaggccctgctgaccgtggccggtgaactgcgtggcccgccgctgcagctggataccggccagctgctgaaaatcgcgaaacgtggcggtgtgaccgctgtggaagctgtgcatgcctggcgtaatgctctgaccggtgccccgctgaacctgaccccacagcaggtggtggcaatcgcaagccacgacggaggcaagcaggccctggagaccgtgcagaggctgctgcccgtgctgtgccaggcacacggactgacacctgaacaggtcgtggcaatcgcatccaacggaggcggcaagcaggccctggaaaccgtgcagcgcctgttacccgtgctgtgccaggcccacggcctgacaccccagcaggtggtggccatcgcctctaatggagggggcaagcaggccctggagacggtgcagcggctgctgcctgtgctgtgccaggctcatggactgacaccagaacaggtggtcgcaatcgcaagcaacggaggtggcaagcaggccctggagactgtgcaggccctgcttcccgtgctgtgccaggctcacggactgacacctcagcaggtcgtcgccatcgcctccaacaatggtggcaagcaggccctggagacagtgcagagactgctgccagtgctgtgccaagcccatggactgacaccacagcaggtcgtcgctatcgcctctaataacggcggcaagcaggccctggagacggtacagaggctgttacccgtgctgtgccaagcacacggactgacaccagagcaggtcgtcgcaatcgccagcaatatcggtggcaagcaggccctggagacggtccagcgcctgctccccgtgctgtgccaagcccacggcctgacccctcagcaggtcgtggctattgctagcaataacgggggcaagcaggccctggagacggttcagcggctgttgcccgtgctgtgccaagcccacggtctgacccctcagcaggtggtcgctattgcttctaatggaggaggcaagcaggccctggagacggtacagagactgttacctgtgctgtgccaggcacatggcctgacaccagagcaggtggtcgctatcgccagcaacataggtggcaagcaggccctggagacggtacagaggctgcttcccgtgctgtgccaagctcatggcctgacacctgaacaggtggtcgccattgctagcaataacggtggcaagcaggccctggagacggtacagcggctgttaccagtgctgtgccaagcacatggcttaacccctcaacaggtcgtcgcaattgcctctaatatcggaggcaagcaggccctggagacggtacagcggctgctccccgtgctgtgccaggcgcacggcctgactcctcagcaggtcgtggcaatcgccagcaacatcggcggcagacctgccctggagagcattgtggcgcagctgagccgtccagacccggccctggcggctctgaccaatgatcacctggtggccctggcctgcctgggtggccgtccggctctggatgccgtgaagaaaggtctgggc

SEQ ID NO: 158 - DNA, 1488 bp, Artificial Sequence
  Synthetic
ctgacccctgagcaggtggtggccatcgccagcaatatcggaggcaagcaggccctggagaccgtgcaggccctgctgcccgtgctgtgccaggcacacggactgacacctcagcaggtcgtcgccatcgcctccaacaatggcggcaagcaggccctggaaaccgtgcagaggctgttacccgtgctgtgccaggcccacggcctgacaccccagcaggtggtggcaatcgcatctcacgatgggggcaagcaggccctggagacggtgcagcgcctgctgcctgtgctgtgccaggctcatggactgacaccagaacaggtcgtggccatcgccagcaacattggcggcaagcaggccctggagactgtccaggccctgttacccgtgctgtgccaagcccatggactgacacctgaacaggtcgtggcaatcgcatccaatggaggtggcaagcaggccctggagacagtgcaggccctgctgccagtgctgtgccaggctcacggcctgacaccagaacaggtggtcgcaatcgcatctaatggaggaggcaagcaggccctggagacggtacaggccctgttgcccgtgctgtgccaagcccacggactgacaccagagcaggtcgtcgctattgcttccaacattggaggcaagcaggccctggagacggtccagcggctgcttcccgtgctgtgccaagctcatggcctgacaccagagcaggtggtcgctattgcctccaacaatggaggcaagcaggccctggagacggttcaggccctgcttcccgtgctgtgccaggctcatggtctgacacccgaacaggtggtcgctatcgcctctcacgatggaggcaagcaggccctggagacggtacagaggctgttacctgtgctgtgccaggcccatgggctgaccccagaacaggtggtcgccatcgccagcaacatcggcggcaagcaggccctggagacggtacaggccctgctccccgtgctgtgccaagcacatggcctgacacccgagcaggtcgtggctattgctagcaacaacgggggcaagcaggccctggagacggtacaggccctgctaccagtgctgtgccaagcgcacgggctgaccccagagcaggtcgtcgcaatcgcctctaacaacggtggcaagcaggccctggagacggtacaggccctgctgcccgtgctgtgccaagcgcatgggctgactccagaacaggtggtggctatcgccagcaacattggaggcaagcaggccctggagacggtacagcggctgctacccgtgctgtgccaagcgcacggtctgacacctcagcaggtggtcgctatcgcttctaacatagggggcaagcaggccctggagacggtacagcggctgctgcccgtgctgtgccaagcgcacggactgaccccacagcaggtcgtcgctatcgcctctaacggaggaggcagacccgccctggag

SEQ ID NO: 159 - protein, 496 aa, Artificial Sequence
  Synthetic
LTPEQVVAIASNIGGKQALETVQALLPVLCQAHGLTPQQVVAIASNNGGKQALETVQRLLPVLCQAHGLTPQQVVAIASHDGGKQALETVQRLLPVLCQAHGLTPEQVVAIASNIGGKQALETVQALLPVLCQAHGLTPEQVVAIASNGGGKQALETVQALLPVLCQAHGLTPEQVVAIASNGGGKQALETVQALLPVLCQAHGLTPEQVVAIASNIGGKQALETVQRLLPVLCQAHGLTPEQVVAIASNNGGKQALETVQALLPVLCQAHGLTPEQVVAIASHDGGKQALETVQRLLPVLCQAHGLTPEQVVAIASNIGGKQALETVQALLPVLCQAHGLTPEQVVAIASNNGGKQALETVQALLPVLCQAHGLTPEQVVAIASNNGGKQALETVQALLPVLCQAHGLTPEQVVAIASNIGGKQALETVQRLLPVLCQAHGLTPQQVVAIASNIGGKQALETVQRLLPVLCQAHGLTPQQVVAIASNGGGRPALE

SEQ ID NO: 160 - DNA, 2127 bp, Artificial Sequence
  Synthetic
gacatcgcggatctgcgtaccctgggttacagccagcagcagcaggagaagatcaagccgaaggtgcgcagcaccgtggctcagcaccacgaagccctggtgggccacggtttcacccacgctcacatcgtggccctgagccagcacccagccgcgctgggcaccgtggccgtgaaatatcaggacatgattgctgccctgccagaggccacccatgaagctattgtgggcgtgggcaagcagtggagcggtgctcgtgcgctggaggcgctgctgaccgtggctggtgaactgcgtggtccgccgctgcagctggataccggtcagctgctgaaaattgccaaacgtggcggtgtgaccgcggtggaagccgtgcatgcttggcgtaatgctctgaccggtgcgccgctgaacctgaccccgcagcaggtggtggctattgccagcaacaacggcggtaaacaggctctggagaccgtgcagcgtctgctgccggtgctgtgccaggctcatggtctgaccccggagcaggtggtggccattgctagccatgatggcggcaagcaggcgctggaaaccgtgcagcgcctgttaccggtgctgtgccaagcccatggtctgaccccgcagcaagttgtggctattgcgagcaacggcggtggcaaacaggccctggaaaccgttcagcgtctgttaccggtgctgtgccaggcccatggcctgaccccggaacaagtggtggctatcgccagcaacattggtggcaagcaggccctggaaaccgtgcaggcgctgttgccggtgctgtgccaagcccatgggctgaccccgcagcaagtggttgcgatcgctagcaacaacggtggcaaacaggctctggaaaccgttcagcgcctgcttccggtgctgtgccaagcgcatggcttaaccccgcagcaagttgtggccattgcgagcaacaacggtggcaagcaggcgctggagaccgttcagcgtctgcttccggtgctgtgccaggcgcatggcctgaccccggagcaagtggtggctattgctagccacgatggtggcaaacaggccctggagaccgtgcagcgcctgctcccggtgctgtgccaggcccatggattaaccccgcagcaagtggtggccatcgccagcaatggcggcggcaagcaggctctggaaactgtgcagcgtctgttaccggtgctgtgccaggcccatgggttaaccccgcagcaggttgttgccattgcctccaataatggcggtaaacaggcgctggagactgtgcagcgcctgctaccggtgctgtgccaggcacatggtctgaccccggaacaagttgttgccattgcgtcccatgatggcggcaagcaggccctggagactgttcagcgtctgctcccggtgctgtgccaggcccatggtttaaccccggaacaagttgtggccattgctagccacgatggcggtaaacaggctctggaaactgttcagcgcctgctgccggtgctgtgccaagcacatggcttaaccccggaacaggttgttgctattgccagcaacatcggcggcaagcaggctctggagaccgttcaggccctgttgccggtgctgtgccaggcccatgggcttaccccggaacaagtggttgccatcgccagcaacattggcggtaaacaggcgctggaaaccgttcaggctctgttgccggtgctgtgccaggctcatggccttaccccgcagcaagttgtggcgattgctagcaatggcggtggcaagcaggcgctggagacggttcagcgtctgctaccggtgctgtgccaggctcatggattgaccccgcagcaggtcgtggccattgcctccaataacggtggcaaacaggcgctggagacagttcagcgcctgctgccggtgctgtgccaggctcatgggttgaccccgcagcaggtagttgctattgctagcaatggtggcggtcgtccggccctggagagcattgtggcgcagctgagccgtccagacccggcgctggcggctctgaccaacgatcacctggtggcgctggcttgcctgggcggtcgtccggccctggatgccgtgaagaaaggcctgggt

SEQ ID NO: 161 - protein, 709 aa, Artificial Sequence
  Synthetic
DIADLRTLGYSQQQQEKIKPKVRSTVAQHHEALVGHGFTHAHIVALSQHPAALGTVAVKYQDMIAALPEATHEAIVGVGKQWSGARALEALLTVAGELRGPPLQLDTGQLLKIAKRGGVTAVEAVHAWRNALTGAPLNLTPQQVVAIASNNGGKQALETVQRLLPVLCQAHGLTPEQVVAIASHDGGKQALETVQRLLPVLCQAHGLTPQQVVAIASNGGGKQALETVQRLLPVLCQAHGLTPEQVVAIASNIGGKQALETVQALLPVLCQAHGLTPQQVVAIASNNGGKQALETVQRLLPVLCQAHGLTPQQVVAIASNNGGKQALETVQRLLPVLCQAHGLTPEQVVAIASHDGGKQALETVQRLLPVLCQAHGLTPQQVVAIASNGGGKQALETVQRLLPVLCQAHGLTPQQVVAIASNNGGKQALETVQRLLPVLCQAHGLTPEQVVAIASHDGGKQALETVQRLLPVLCQAHGLTPEQVVAIASHDGGKQALETVQRLLPVLCQAHGLTPEQVVAIASNIGGKQALETVQALLPVLCQAHGLTPEQVVAIASNIGGKQALETVQALLPVLCQAHGLTPQQVVAIASNGGGKQALETVQRLLPVLCQAHGLTPQQVVAIASNNGGKQALETVQRLLPVLCQAHGLTPQQVVAIASNGGGRPALESIVAQLSRPDPALAALTNDHLVALACLGGRPALDAVKKGLG

SEQ ID NO: 162 - DNA, 2025 bp, Artificial Sequence
  Synthetic
gacatcgcggatctgcgtaccctgggttacagccagcagcagcaggagaagatcaagccgaaggtgcgcagcaccgtggctcagcaccacgaagccctggtgggccacggtttcacccacgctcacattgtggccctgagccagcacccagccgcgctgggcaccgtggccgtgaaatatcaggatatgattgctgccctgccagaggccacccatgaagctattgtgggcgtgggcaagcagtggagcggtgctcgtgcgctggaggcgctgctgaccgtggctggtgaactgcgtggtccgccgctgcagctggacaccggtcagctgctgaaaatcgcgaaacgtggcggtgtgaccgcggtggaagccgtgcatgcttggcgtaatgctctgaccggtgcgccgctgaacctgacccctgagcaggtggtggcaatcgcaagccacgacggaggcaagcaggccctggagacagtgcaggccctgctgcccgtgctgtgccaggcacacggcctgacacctgagcaggtggtggccatcgcctccaacatcggcggcaagcaggccctggagacagtacagaggctgttacccgtgctgtgccaggcccacggcctgacaccccagcaggtcgtcgccatcgcctctaatattggaggcaagcaggccctggagacagtccagcgcctgctgcctgtgctgtgccaggctcatggcctgacaccagaacaggtcgtggccatcgccagtaatattgggggcaagcaggccctggagacagttcaggccctgttacccgtgctgtgccaagcccatggcctgacacctgaacaggtggtcgccatcgcctccaatattggtggcaagcaggccctggagacagtacaggccctgctgccagtgctgtgccaggctcacggcctgacaccagagcaggtcgtcgcaatcgcatctcatgatggcggcaagcaggccctggagacagtacaggccctgttacccgtgctgtgccaagcgcacggcctgacccctgaacaggtcgtggctattgcaagccacgatggtggcaagcaggccctggagacagtacagcggctgcttcccgtgctgtgccaagctcatggcctgacacctgagcaggtcgtcgctattgctagcaatattggcggcaagcaggccctggagacagtacaggccctgctccccgtgctgtgccaagcacacggcctgacacccgaacaggtggtggctatcgcctctaatggaggtggcaagcaggccctggagacagtacagaggctgcttcctgtgctgtgccaggcccatggcctgacccctgagcaggtcgtggctattgccagtaatataggaggcaagcaggccctggagacagtacaggccctgctacccgtgctgtgccaagcgcatggcctgaccccagaacaggtcgtggcaatcgcatctcatgacggcggcaagcaggccctggagacagtacaggccctgctaccagtgctgtgccaagcacatggcctgacccccgaacaggtggtggcaatcgcctctcacgacgggggcaagcaggccctggagacagtacaggccctgctacccgtgctgtgccaagcgcacggcctgacgccagaacaggtggtcgctatcgcaagcaacggcggtggcaagcaggccctggagacagtacagcggctgctacccgtgctgtgccaagcgcacggcctgactcctcagcaggtcgtcgctatcgcatctcatgatggtggcaagcaggccctggagacagtacagcggctgctacccgtgctgtgccaagcgcacggcctgacaccacagcaggtcgtcgcaattgcatctaacggaggaggcagacccgccctggagagcattgtggctcagctgagccgtccagacccggccctggcggctctgaccaacgatcacctggtggcgctggcttgcctgggcggtcgtccggccctggatgcggtgaagaaaggcctgggt

SEQ ID NO: 163 - protein, 675 aa, Artificial Sequence
  Synthetic
DIADLRTLGYSQQQQEKIKPKVRSTVAQHHEALVGHGFTHAHIVALSQHPAALGTVAVKYQDMIAALPEATHEAIVGVGKQWSGARALEALLTVAGELRGPPLQLDTGQLLKIAKRGGVTAVEAVHAWRNALTGAPLNLTPEQVVAIASHDGGKQALETVQALLPVLCQAHGLTPEQVVAIASNIGGKQALETVQRLLPVLCQAHGLTPQQVVAIASNIGGKQALETVQRLLPVLCQAHGLTPEQVVAIASNIGGKQALETVQALLPVLCQAHGLTPEQVVAIASNIGGKQALETVQALLPVLCQAHGLTPEQVVAIASHDGGKQALETVQALLPVLCQAHGLTPEQVVAIASHDGGKQALETVQRLLPVLCQAHGLTPEQVVAIASNIGGKQALETVQALLPVLCQAHGLTPEQVVAIASNGGGKQALETVQRLLPVLCQAHGLTPEQVVAIASNIGGKQALETVQALLPVLCQAHGLTPEQVVAIASHDGGKQALETVQALLPVLCQAHGLTPEQVVAIASHDGGKQALETVQALLPVLCQAHGLTPEQVVAIASNGGGKQALETVQRLLPVLCQAHGLTPQQVVAIASHDGGKQALETVQRLLPVLCQAHGLTPQQVVAIASNGGGRPALESIVAQLSRPDPALAALTNDHLVALACLGGRPALDAVKKGLG

SEQ ID NO: 164 - DNA, 1923 bp, Artificial Sequence
  Synthetic
gacatcgcggatctgcgtaccctgggttacagccagcagcagcaggagaagatcaagccaaaggtgcgcagcaccgtggcccagcaccatgaagctctggtgggtcacggcttcacccacgcgcacatcgtggctctgagccagcacccagccgcgctgggtaccgtggccgtgaaatatcaggacatgattgctgccctgccagaggctacccatgaagcgattgtgggtgtgggcaagcagtggagcggtgctcgtgcgctggaggccctgctgaccgtggccggtgaactgcgtggcccgccgctgcagctggataccggccagctgctgaaaatcgcgaaacgtggcggtgtgaccgctgtggaagctgtgcatgcctggcgtaatgctctgaccggtgccccgctgaacctgacaccacagcaggtcgtcgctatcgcttcaaacattggggggaaacaggcactggaaaccgtccagagactgctgcccgtcctgtgccaggcccacggcctgacccctgagcaggtggtggccatcgccagcaatatcggaggcaagcaggccctggagaccgtgcagcggctgctgcccgtgctgtgccaagcccacggcttaacacctcagcaggtcgtggctatcgcctccaacaatggcggcaagcaggccctggagacggtgcagagactgctgccagtgctgtgccaggcccacggcttaacaccagaacaggtcgtggccatcgcctctaacattggcggcaagcaggccctggagactgtgcaggccctgctgcccgtgctgtgccaggcccacggccttacaccacagcaggtggtggcaatcgccagcaatggagggggcaagcaggccctggagacagtgcagaggctgctgcccgtgctgtgccaagcccacggcctgacacctcagcaggtggtcgccatcgcctccaacggaggtggcaagcaggccctggagacggtacagcgcctgctgcccgtgctgtgccaagcccacggcctaacacccgaacaggtcgtcgccatcgcctctaacatcggcggcaagcaggccctggagacggtccagcggctgctgcctgtgctgtgccaagcccacggccttacccctcagcaggtcgtggcaatcgccagcaacaatggtggcaagcaggccctggagacggttcagagactgctgcccgtgctgtgccaagcccacggcctcacacctcagcaggtggtggccattgcctccaacggaggaggcaagcaggccctggagacggtacagaggctgctgccagtgctgtgccaggcccacggcctaacaccagaacaggtggtcgctattgcctctaacattggtggcaagcaggccctggagacggtacagcgcctgctgcccgtgctgtgccaagcccacggcctaacgccagaacaggtcgtcgctatcgccagcaacggaggaggcaagcaggccctggagacggtacagcggctgctgcccgtgctgtgccaagcccacggcctaaccccacagcaggtcgtggccattgcctccaataacggcggcaagcaggccctggagacggtacagcggctgctgcccgtgctgtgccaagcccacggcctaactccccagcaagtcgtcgctattgcctctaataacgggggcaagcaggccctggagacggtacagagactgctgcccgtgctgtgccaagcccacggcctgacaccacagcaggtcgtcgccatcgcaagcaacggaggagggaggcccgcactggagagcattgtggcgcagctgagccgtccagacccggccctggcggctctgaccaatgatcacctggtggccctggcctgcctgggtggccgtccggctctggatgccgtgaagaaaggtctgggc

SEQ ID NO: 165 - protein, 641 aa, Artificial Sequence
  Synthetic
DIADLRTLGYSQQQQEKIKPKVRSTVAQHHEALVGHGFTHAHIVALSQHPAALGTVAVKYQDMIAALPEATHEAIVGVGKQWSGARALEALLTVAGELRGPPLQLDTGQLLKIAKRGGVTAVEAVHAWRNALTGAPLNLTPQQVVAIASNIGGKQALETVQRLLPVLCQAHGLTPEQVVAIASNIGGKQALETVQRLLPVLCQAHGLTPQQVVAIASNNGGKQALETVQRLLPVLCQAHGLTPEQVVAIASNIGGKQALETVQALLPVLCQAHGLTPQQVVAIASNGGGKQALETVQRLLPVLCQAHGLTPQQVVAIASNGGGKQALETVQRLLPVLCQAHGLTPEQVVAIASNIGGKQALETVQRLLPVLCQAHGLTPQQVVAIASNNGGKQALETVQRLLPVLCQAHGLTPQQVVAIASNGGGKQALETVQRLLPVLCQAHGLTPEQVVAIASNIGGKQALETVQRLLPVLCQAHGLTPEQVVAIASNGGGKQALETVQRLLPVLCQAHGLTPQQVVAIASNNGGKQALETVQRLLPVLCQAHGLTPQQVVAIASNNGGKQALETVQRLLPVLCQAHGLTPQQVVAIASNGGGRPALESIVAQLSRPDPALAALTNDHLVALACLGGRPALDAVKKGLG

SEQ ID NO: 166 - DNA, 2025 bp, Artificial Sequence
  Synthetic
gacatcgcggatctgcgtaccctgggttacagccagcagcagcaggagaagatcaagccgaaggtgcgcagcaccgtggctcagcaccacgaagccctggtgggccacggtttcacccacgctcacattgtggccctgagccagcacccagccgcgctgggcaccgtggccgtgaaatatcaggatatgattgctgccctgccagaggccacccatgaagctattgtgggcgtgggcaagcagtggagcggtgctcgtgcgctggaggcgctgctgaccgtggctggtgaactgcgtggtccgccgctgcagctggacaccggtcagctgctgaaaatcgcgaaacgtggcggtgtgaccgcggtggaagccgtgcatgcttggcgtaatgctctgaccggtgcgccgctgaacctgactcccgaacaggtggtcgctatcgcttctcatgatggcggaaaacaggctctggaaaccgtccaggctctgctgcccgtgctgtgccaggcccacggcctgaccccacagcaggtcgtcgcaatcgccagcaatatcggaggcaagcaggccctggagaccgtgcagcggctgctgcccgtgctgtgccaagcccacggcttaacacctcagcaggtggtggccatcgcctccaacaatggcggcaagcaggccctggagacggtgcagagactgctgccagtgctgtgccaggcccacggcttaacaccagaacaggtcgtggcaatcgcctctaacggagggggcaagcaggccctggagactgtgcaggccctgctgcccgtgctgtgccaggcccacggccttacaccagaacaggtggtcgccattgccagcaatggaggtggcaagcaggccctggagacagtccaggccctgctgcccgtgctgtgccaagcccacggcctgacacctgaacaggtggtcgcaatcgcctcccacgatgggggcaagcaggccctggagacggtacaggccctgctgcccgtgctgtgccaagcccacggcctaacacccgaacaggtggtggccattgcctctaacggaggaggcaagcaggccctggagacggtccagcggctgctgcctgtgctgtgccaagcccacggccttacccctgaacaagtcgtggccatcgccagcaatggaggaggcaagcaggccctggagacggttcaggccctgctgcccgtgctgtgccaagcccacggcctcacacctgaacaagttgtggccatcgcctcccacgatggtggcaagcaggccctggagacggtacagaggctgctgccagtgctgtgccaggcccacggcctaacaccagaacaggtggtggctatcgcctctaacattggcggcaagcaggccctggagacggtacaggccctgctgcccgtgctgtgccaagcccacggcctaacgccagaacaggtcgtcgctattgccagcaacattgggggcaagcaggccctggagacggtacaggccctgctgcccgtgctgtgccaagcccacggcctaacccctgaacaggtggtggcaatcgcctccaacattggtggcaagcaggccctggagacggtacaggccctgctgcccgtgctgtgccaagcccacggcctaactcccgagcaggtcgtcgccatcgcctctaatggcggcggcaagcaggccctggagacggtacagaggctgctgcctgtgctgtgccaagcccacggcctaacgccgcagcaagtcgtcgctattgccagcaatattggcggcaagcaggccctggagacggtacagcgcctgctgcccgtgctgtgccaagcccacggcctgaccccccagcaggtggtggcaatcgcttcaaacggaggagggagacccgctctggaaagcattgtggctcagctgagccgtccagacccggccctggcggctctgaccaacgatcacctggtggcgctggcttgcctgggcggtcgtccggccctggatgcggtgaagaaaggcctgggt

SEQ ID NO: 167 - protein, 675 aa, Artificial Sequence
  Synthetic
DIADLRTLGYSQQQQEKIKPKVRSTVAQHHEALVGHGFTHAHIVALSQHPAALGTVAVKYQDMIAALPEATHEAIVGVGKQWSGARALEALLTVAGELRGPPLQLDTGQLLKIAKRGGVTAVEAVHAWRNALTGAPLNLTPEQVVAIASHDGGKQALETVQALLPVLCQAHGLTPQQVVAIASNIGGKQALETVQRLLPVLCQAHGLTPQQVVAIASNNGGKQALETVQRLLPVLCQAHGLTPEQVVAIASNGGGKQALETVQALLPVLCQAHGLTPEQVVAIASNGGGKQALETVQALLPVLCQAHGLTPEQVVAIASHDGGKQALETVQALLPVLCQAHGLTPEQVVAIASNGGGKQALETVQRLLPVLCQAHGLTPEQVVAIASNGGGKQALETVQALLPVLCQAHGLTPEQVVAIASHDGGKQALETVQRLLPVLCQAHGLTPEQVVAIASNIGGKQALETVQALLPVLCQAHGLTPEQVVAIASNIGGKQALETVQALLPVLCQAHGLTPEQVVAIASNIGGKQALETVQALLPVLCQAHGLTPEQVVAIASNGGGKQALETVQRLLPVLCQAHGLTPQQVVAIASNIGGKQALETVQRLLPVLCQAHGLTPQQVVAIASNGGGRPALESIVAQLSRPDPALAALTNDHLVALACLGGRPALDAVKKGLG

SEQ ID NO: 168 - DNA, 1719 bp, Artificial Sequence
  Synthetic
gacatcgcggatctgcgtaccctgggttacagccagcagcagcaggagaagatcaagccaaaggtgcgcagcaccgtggcccagcaccatgaagctctggtgggtcacggcttcacccacgcgcacatcgtggctctgagccagcacccagccgcgctgggtaccgtggccgtgaaatatcaggacatgattgctgccctgccagaggctacccatgaagcgattgtgggtgtgggcaagcagtggagcggtgctcgtgcgctggaggccctgctgaccgtggccggtgaactgcgtggcccgccgctgcagctggataccggccagctgctgaaaatcgcgaaacgtggcggtgtgaccgctgtggaagctgtgcatgcctggcgtaatgctctgaccggtgccccgctgaacctgacccctcagcaggtggtggccatcgccagcaacatcggcggcaagcaggccctggagacagtgcagaggctgctgcccgtgctgtgccaggcacacggcctgacacctgagcaggtggtggcaatcgcatccaatggaggaggcaagcaggccctggagacagtacagcgcctgttacccgtgctgtgccaggcccacggcctgacaccccagcaggtcgtcgccatcgcctctaacaatgggggcaagcaggccctggagacagtccagcggctgctgcctgtgctgtgccaggctcatggcctgacaccagaacaggtcgtggctattgccagcaacaatggtggcaagcaggccctggagacagttcaggccctgcttcccgtgctgtgccaggctcacggcctgacaccacagcaggtcgtggccatcgcctccaacaatggcggcaagcaggccctggagacagtacagagactgctgccagtgctgtgccaagcccatggcctgacccctcagcaggtcgtggcaatcgcatctcacgacggtggcaagcaggccctggagacagtacagaggctgttacccgtgctgtgccaagcacacggcctgacaccagagcaggtcgtcgcaatcgcaagcaacggcggcggcaagcaggccctggagacagtacagcgcctgctccccgtgctgtgccaagcccacggcctgacacctcagcaggtggtcgccattgccagcaacggcgggggcaagcaggccctggagacagtacagcggctgttgcccgtgctgtgccaagcccacggcctgacgccccagcaggtggtcgccatcgcatctaacggcggtggcaagcaggccctggagacagtacagcggctgcttcctgtgctgtgccaggcccatggcctgacccccgaacaggtcgtggctatcgctagcaacaatggcggcaagcaggccctggagacagtacagagactgttacccgtgctgtgccaagcgcatggcctgacccctgaacaggtcgtggcaattgcctccaataacggtggcaagcaggccctggagacagtacagcggctgctaccagtgctgtgccaagcacatggcctgaccccccagcaggtcgtggctattgcatctaatggaggaggcagacccgccctggagagcattgtggcgcagctgagccgtccagacccggccctggcggctctgaccaatgatcacctggtggccctggcctgcctgggtggccgtccggctctggatgccgtgaagaaaggtctgggc

SEQ ID NO: 169 - DNA, 2127 bp, Artificial Sequence
  Synthetic
gacatcgcggatctgcgtaccctgggttacagccagcagcagcaggagaagatcaagccgaaggtgcgcagcaccgtggctcagcaccacgaagccctggtgggccacggtttcacccacgctcacatcgtggccctgagccagcacccagccgcgctgggcaccgtggccgtgaaatatcaggacatgattgctgccctgccagaggccacccatgaagctattgtgggcgtgggcaagcagtggagcggtgctcgtgcgctggaggcgctgctgaccgtggctggtgaactgcgtggtccgccgctgcagctggataccggtcagctgctgaaaatcgcgaaacgtggcggtgtgaccgcggtggaagccgtgcatgcttggcgtaatgctctgaccggtgcgccgctgaacctgaccccggagcaggtggtggctatcgccagcaacattggcggtaaacaggccctggaaaccgtgcaggcgctgctgccggtgctgtgccaggctcatggtctgaccccgcagcaggtggtggcgatcgctagcaacggcggtggcaagcaggctctggagaccgtgcagcgtctgttaccggtgctgtgccaagcccatggcctgaccccgcagcaagttgtggccattgcgagcaatggtggcggtaaacaggcgctggaaaccgtgcagcgcctgttgccggtgctgtgccaagcccatgggctgaccccggaacaagttgttgctatcgccagcaacatcggcggcaagcaggctctggaaaccgtgcaggccctgcttccggtgctgtgccaagcgcatggtctgaccccggaacaagtggtggccatcgcttccaatattggcggtaaacaggcgctggagaccgtgcaggctctgctcccggtgctgtgccaagcacatggtctgaccccggagcaagttgtggctattgcctccaatatcggcggcaagcaggccctggagaccgttcaggcgctgttaccggtgctgtgccaggcccatggattaaccccggagcaagtggtggctattgctagccatgatggcggtaaacaggccctggagactgttcagcgtctgctaccggtgctgtgccaggcccatggtttaaccccggaacaggttgttgccatcgcttccaacatcggcggcaagcaggctctggaaacggtgcaggccctgttaccggtgctgtgccaggcccatgggttaaccccggaacaagttgtggccattgcctcccatgacggcggtaaacaggctctggagaccgttcagcgcctgctaccggtgctgtgccaggcgcatggcttaaccccggaacaagtggttgccattgcgtccaatatcggcggcaagcaggcgctggagaccgttcaggctctgcttccggtgctgtgccaggcacatggccttaccccggaacaagtggtcgcgatcgcttccaacattggcggtaaacaggccctggaaacggttcaggcgctgcttccggtgctgtgccaggcccatgggcttaccccggaacaggttgtggctattgccagtaatatcggcggcaagcaggctctggaaactgtgcaggccctgctaccggtgctgtgccaggctcatgggctgaccccggagcaagtggttgccattgcctcccatgatggcggtaaacaggcgctggaaacggtgcagcgtctgcttccggtgctgtgccaggctcatggcttaaccccgcagcaagttgttgcgattgctagcaatggcggtggcaagcaggccctggaaactgttcagcgcctgttaccggtgctgtgccaggcccatgggctaaccccggaacaggtggttgctattgccagcaacattggtggcaaacaggcgctggaaactgtgcaggctctgcttccggtgctgtgccaggcccatgggctgaccccgcagcaagtggttgctattgctagcaatggtggcggtcgtccggccctggagagcattgtggcgcagctgagccgtccagacccggccctggcggctctgaccaacgatcacctggtggcgctggcttgcctgggcggtcgtccggccctggatgcggtgaagaaaggcctgggt

SEQ ID NO: 170 - protein, 709 aa, Artificial Sequence
  Synthetic
DIADLRTLGYSQQQQEKIKPKVRSTVAQHHEALVGHGFTHAHIVALSQHPAALGTVAVKYQDMIAALPEATHEAIVGVGKQWSGARALEALLTVAGELRGPPLQLDTGQLLKIAKRGGVTAVEAVHAWRNALTGAPLNLTPEQVVAIASNIGGKQALETVQALLPVLCQAHGLTPQQVVAIASNGGGKQALETVQRLLPVLCQAHGLTPQQVVAIASNGGGKQALETVQRLLPVLCQAHGLTPEQVVAIASNIGGKQALETVQALLPVLCQAHGLTPEQVVAIASNIGGKQALETVQALLPVLCQAHGLTPEQVVAIASNIGGKQALETVQALLPVLCQAHGLTPEQVVAIASHDGGKQALETVQRLLPVLCQAHGLTPEQVVAIASNIGGKQALETVQALLPVLCQAHGLTPEQVVAIASHDGGKQALETVQRLLPVLCQAHGLTPEQVVAIASNIGGKQALETVQALLPVLCQAHGLTPEQVVAIASNIGGKQALETVQALLPVLCQAHGLTPEQVVAIASNIGGKQALETVQALLPVLCQAHGLTPEQVVAIASHDGGKQALETVQRLLPVLCQAHGLTPQQVVAIASNGGGKQALETVQRLLPVLCQAHGLTPEQVVAIASNIGGKQALETVQALLPVLCQAHGLTPQQVVAIASNGGGRPALESIVAQLSRPDPALAALTNDHLVALACLGGRPALDAVKKGLG

SEQ ID NO: 171 - protein, 777 aa, Artificial Sequence
  Synthetic
DIADLRTLGYSQQQQEKIKPKVRSTVAQHHEALVGHGFTHAHIVALSQHPAALGTVAVKYQDMIAALPEATHEAIVGVGKQWSGARALEALLTVAGELRGPPLQLDTGQLLKIAKRGGVTAVEAVHAWRNALTGAPLNLTPEQVVAIASHDGGKQALETVQALLPVLCQAHGLTPQQVVAIASNGGGKQALETVQRLLPVLCQAHGLTPQQVVAIASNGGGKQALETVQRLLPVLCQAHGLTPEQVVAIASNIGGKQALETVQALLPVLCQAHGLTPEQVVAIASNNGGKQALETVQALLPVLCQAHGLTPEQVVAIASHDGGKQALETVQALLPVLCQAHGLTPEQVVAIASNIGGKQALETVQRLLPVLCQAHGLTPEQVVAIASNGGGKQALETVQALLPVLCQAHGLTPEQVVAIASNIGGKQALETVQRLLPVLCQAHGLTPEQVVAIASHDGGKQALETVQALLPVLCQAHGLTPEQVVAIASNGGGKQALETVQALLPVLCQAHGLTPEQVVAIASHDGGKQALETVQALLPVLCQAHGLTPEQVVAIASHDGGKQALETVQRLLPVLCQAHGLTPQQVVAIASNGGGKQALETVQRLLPVLCQAHGLTPEQVVAIASHDGGKQALETVQALLPVLCQAHGLTPEQVVAIASNIGGKQALETVQALLPVLCQAHGLTPEQVVAIASNIGGKQALETVQALLPVLCQAHGLTPQQVVAIASNGGGRPALESIVAQLSRPDPALAALTNDHLVALACLGGRPALDAVKKGLG

SEQ ID NO: 172 - protein, 675 aa, Artificial Sequence
  Synthetic
DIADLRTLGYSQQQQEKIKPKVRSTVAQHHEALVGHGFTHAHIVALSQHPAALGTVAVKYQDMIAALPEATHEAIVGVGKQWSGARALEALLTVAGELRGPPLQLDTGQLLKIAKRGGVTAVEAVHAWRNALTGAPLNLTPEQVVAIASNIGGKQALETVQALLPVLCQAHGLTPQQVVAIASNNGGKQALETVQRLLPVLCQAHGLTPQQVVAIASHDGGKQALETVQRLLPVLCQAHGLTPEQVVAIASNIGGKQALETVQALLPVLCQAHGLTPEQVVAIASNGGGKQALETVQALLPVLCQAHGLTPEQVVAIASNGGGKQALETVQALLPVLCQAHGLTPEQVVAIASNIGGKQALETVQRLLPVLCQAHGLTPEQVVAIASNNGGKQALETVQALLPVLCQAHGLTPEQVVAIASHDGGKQALETVQRLLPVLCQAHGLTPEQVVAIASNIGGKQALETVQALLPVLCQAHGLTPEQVVAIASNNGGKQALETVQALLPVLCQAHGLTPEQVVAIASNNGGKQALETVQALLPVLCQAHGLTPEQVVAIASNIGGKQALETVQRLLPVLCQAHGLTPQQVVAIASNIGGKQALETVQRLLPVLCQAHGLTPQQVVAIASNGGGRPALESIVAQLSRPDPALAALTNDHLVALACLGGRPALDAVKKGLG

SEQ ID NO: 173 - protein, 675 aa, Artificial Sequence
  Synthetic
DIADLRTLGYSQQQQEKIKPKVRSTVAQHHEALVGHGFTHAHIVALSQHPAALGTVAVKYQDMIAALPEATHEAIVGVGKQWSGARALEALLTVAGELRGPPLQLDTGQLLKIAKRGGVTAVEAVHAWRNALTGAPLNLTPEQVVAIASHDGGKQALETVQALLPVLCQAHGLTPQQVVAIASNIGGKQALETVQRLLPVLCQAHGLTPQQVVAIASNIGGKQALETVQRLLPVLCQAHGLTPEQVVAIASNIGGKQALETVQALLPVLCQAHGLTPEQVVAIASNIGGKQALETVQALLPVLCQAHGLTPEQVVAIASHDGGKQALETVQALLPVLCQAHGLTPEQVVAIASHDGGKQALETVQRLLPVLCQAHGLTPEQVVAIASNIGGKQALETVQALLPVLCQAHGLTPEQVVAIASNGGGKQALETVQRLLPVLCQAHGLTPEQVVAIASNIGGKQALETVQALLPVLCQAHGLTPEQVVAIASHDGGKQALETVQALLPVLCQAHGLTPEQVVAIASHDGGKQALETVQALLPVLCQAHGLTPEQVVAIASNGGGKQALETVQRLLPVLCQAHGLTPQQVVAIASHDGGKQALETVQRLLPVLCQAHGLTPQQVVAIASNGGGRPALESIVAQLSRPDPALAALTNDHLVALACLGGRPALDAVKKGLG

SEQ ID NO: 174 - protein, 578 aa, Artificial Sequence
  Synthetic
MLGFVGRVAAAPASGALRRLTPSASLPPAQLLLRAAPTAVHPVRDYAAQDYKDDDDKVDEMTKKFGTLTIHDTEKGSLQKKLEELELDAAMAERPFQCDICMRNFSTSGSLSRHIRTHTGEKPFQCDICMRNFSQSGSLTRHIRTHTGSEKPFQCDICMRNFSRSDALSQHIRTHTGEKPFQCDICMRNFSRNDNRITHIRTHTGEKPFQCDICMRNFSRSDHLTQHTKIHLRGSGGGGSGGSGGSGSYALGPYQISAPQLPAYNGQTVGTFYYVNDAGGLESKVFSSGGPTPYPNYANAGHVEGQSALFMRDNGISEGLVFHNNPEGTCGFCVNMTETLLPENAKMTVVPPEGSGGSTNLSDIIEKETGKQLVIQESILMLPEEVEEVIGNKPESDILVHTAYDESTDENVMLLTSDAPEYKPWALVIQDSNGENKIKMLGSGATNFSLLKQAGDVEENPGPMASVLTPLLLRGLTGSARRLPVPRAKIHSLGSTNLSDIIEKETGKQLVIQESILMLPEEVEEVIGNKPESDILVHTAYDESTDENVMLLTSDAPEYKPWALVIQDSNGENKIKML

SEQ ID NO: 175 - protein, 500 aa, Artificial Sequence
  Synthetic
MLGFVGRVAAAPASGALRRLTPSASLPPAQLLLRAAPTAVHPVRDYAAQDYKDDDDKVDEMTKKFGTLTIHDTEKGSLQKKLEELELDAAMAERPFQCDICMRNFSQASNLISHIRTHTGEKPFQCDICMRNFSTSHSLTEHIRTHTGSEKPFQCDICMRNFSERSHLREHIRTHTGEKPFQCDICMRNFSQSGNLTEHIRTHTGEKPFQCDICMRNFSSKKALTEHTKIHLRGSGGGGSGGSGGSAIPVKRGATGETKVFTGNSNSPKSPTKGGCSGGSTNLSDIIEKETGKQLVIQESILMLPEEVEEVIGNKPESDILVHTAYDESTDENVMLLTSDAPEYKPWALVIQDSNGENKIKMLGSGATNFSLLKQAGDVEENPGPMASVLTPLLLRGLTGSARRLPVPRAKIHSLGSTNLSDIIEKETGKQLVIQESILMLPEEVEEVIGNKPESDILVHTAYDESTDENVMLLTSDAPEYKPWALVIQDSNGENKIKML

SEQ ID NO: 176 - protein, 500 aa, Artificial Sequence
  Synthetic
MLGFVGRVAAAPASGALRRLTPSASLPPAQLLLRAAPTAVHPVRDYAAQDYKDDDDKVDEMTKKFGTLTIHDTEKGSLQKKLEELELDAAMAERPFQCDICMRNFSQASNLISHIRTHTGEKPFQCDICMRNFSQRANLRAHIRTHTGSEKPFQCDICMRNFSQASNLISHIRTHTGEKPFQCDICMRNFSTSHSLTEHIRTHTGEKPFQCDICMRNFSERSHLREHTKIHLRGSGGGGSGGSGGSAIPVKRGATGETKVFTGNSNSPKSPTKGGCSGGSTNLSDIIEKETGKQLVIQESILMLPEEVEEVIGNKPESDILVHTAYDESTDENVMLLTSDAPEYKPWALVIQDSNGENKIKMLGSGATNFSLLKQAGDVEENPGPMASVLTPLLLRGLTGSARRLPVPRAKIHSLGSTNLSDIIEKETGKQLVIQESILMLPEEVEEVIGNKPESDILVHTAYDESTDENVMLLTSDAPEYKPWALVIQDSNGENKIKML

SEQ ID NO: 177 - protein, 578 aa, Artificial Sequence
  Synthetic
MLGFVGRVAAAPASGALRRLTPSASLPPAQLLLRAAPTAVHPVRDYAAQDYKDDDDKVDEMTKKFGTLTIHDTEKGSLQKKLEELELDAAMAERPFQCDICMRNFSRSDNLSTHIRTHTGEKPFQCDICMRNFSDRSDLSRHIRTHTGEKPFQCDICMRNFSQSGDLTRHIRTHTGSEKPFQCDICMRNFSRSDSLSAHIRTHTGEKPFQCDICMRNFSQKATRITHTKIHLRGSGGGGSGGSGGSGSYALGPYQISAPQLPAYNGQTVGTFYYVNDAGGLESKVFSSGGPTPYPNYANAGHVEGQSALFMRDNGISEGLVFHNNPEGTCGFCVNMTETLLPENAKMTVVPPEGSGGSTNLSDIIEKETGKQLVIQESILMLPEEVEEVIGNKPESDILVHTAYDESTDENVMLLTSDAPEYKPWALVIQDSNGENKIKMLGSGATNFSLLKQAGDVEENPGPMASVLTPLLLRGLTGSARRLPVPRAKIHSLGSTNLSDIIEKETGKQLVIQESILMLPEEVEEVIGNKPESDILVHTAYDESTDENVMLLTSDAPEYKPWALVIQDSNGENKIKML

SEQ ID NO: 178 - protein, 500 aa, Artificial Sequence
  Synthetic
MLGFVGRVAAAPASGALRRLTPSASLPPAQLLLRAAPTAVHPVRDYAAQDYKDDDDKVDEMTKKFGTLTIHDTEKGSLQKKLEELELDAAMAERPFQCDICMRNFSQSSSLVRHIRTHTGEKPFQCDICMRNFSRSDNLVRHIRTHTGSEKPFQCDICMRNFSQAGHLASHIRTHTGEKPFQCDICMRNFSRKDNLKNHIRTHTGEKPFQCDICMRNFSRKDALRGHTKIHLRGSGGGGSGGSGGSAIPVKRGATGETKVFTGNSNSPKSPTKGGCSGGSTNLSDIIEKETGKQLVIQESILMLPEEVEEVIGNKPESDILVHTAYDESTDENVMLLTSDAPEYKPWALVIQDSNGENKIKMLGSGATNFSLLKQAGDVEENPGPMASVLTPLLLRGLTGSARRLPVPRAKIHSLGSTNLSDIIEKETGKQLVIQESILMLPEEVEEVIGNKPESDILVHTAYDESTDENVMLLTSDAPEYKPWALVIQDSNGENKIKML

SEQ ID NO: 179 - protein, 500 aa, Artificial Sequence
  Synthetic
MLGFVGRVAAAPASGALRRLTPSASLPPAQLLLRAAPTAVHPVRDYAAQDYKDDDDKVDEMTKKFGTLTIHDTEKGSLQKKLEELELDAAMAERPFQCDICMRNFSRSDHLTTHIRTHTGEKPFQCDICMRNFSQSSSLVRHIRTHTGSEKPFQCDICMRNFSRSDNLVRHIRTHTGEKPFQCDICMRNFSQAGHLASHIRTHTGEKPFQCDICMRNFSRKDNLKNHTKIHLRGSGGGGSGGSGGSAIPVKRGATGETKVFTGNSNSPKSPTKGGCSGGSTNLSDIIEKETGKQLVIQESILMLPEEVEEVIGNKPESDILVHTAYDESTDENVMLLTSDAPEYKPWALVIQDSNGENKIKMLGSGATNFSLLKQAGDVEENPGPMASVLTPLLLRGLTGSARRLPVPRAKIHSLGSTNLSDIIEKETGKQLVIQESILMLPEEVEEVIGNKPESDILVHTAYDESTDENVMLLTSDAPEYKPWALVIQDSNGENKIKML

SEQ ID NO: 180 - protein, 428 aa, Artificial Sequence
  Synthetic
MLGFVGRVAAAPASGALRRLTPSASLPPAQLLLRAAPTAVHPVRDYAAQDYKDDDDKVDEMTKKFGTLTIHDTEKAAMAERPFQCRICMRNFSTSGSLSRHIRTHTGEKPFACDICGRKFAQSGSLTRHTKIHTGGQRPFQCRICMRNFSRSDALSQHIRTHTGEKPFACDICGRKFARNDNRITHTKIHTGEKPFQCRICMRKFARSDHLTQHTKIHLRGSGGGGSGGSGGSGSYALGPYQISAPQLPAYNGQTVGTFYYVNDAGGLESKVFSSGGPTPYPNYANAGHVEGQSALFMRDNGISEGLVFHNNPEGTCGFCVNMTETLLPENAKMTVVPPEGSGGSTNLSDIIEKETGKQLVIQESILMLPEEVEEVIGNKPESDILVHTAYDESTDENVMLLTSDAPEYKPWALVIQDSNGENKIKML

SEQ ID NO: 181 - protein, 350 aa, Artificial Sequence
  Synthetic
MLGFVGRVAAAPASGALRRLTPSASLPPAQLLLRAAPTAVHPVRDYAAQDYKDDDDKVDEMTKKFGTLTIHDTEKAAMAERPFQCRICMRNFSQASNLISHIRTHTGEKPFACDICGRKFATSHSLTEHTKIHTGSQKPFQCRICMRNFSERSHLREHIRTHTGEKPFACDICGRKFAQSGNLTEHTKIHTGEKPFQCRICMRKFASKKALTEHTKIHLRGSGGGGSGGSGGSAIPVKRGATGETKVFTGNSNSPKSPTKGGCSGGSTNLSDIIEKETGKQLVIQESILMLPEEVEEVIGNKPESDILVHTAYDESTDENVMLLTSDAPEYKPWALVIQDSNGENKIKML

SEQ ID NO: 182 - protein, 350 aa, Artificial Sequence
  Synthetic
MLGFVGRVAAAPASGALRRLTPSASLPPAQLLLRAAPTAVHPVRDYAAQDYKDDDDKVDEMTKKFGTLTIHDTEKAAMAERPFQCRICMRNFSQASNLISHIRTHTGEKPFACDICGRKFAQRANLRAHTKIHTGSQKPFQCRICMRNFSQASNLISHIRTHTGEKPFACDICGRKFATSHSLTEHTKIHTGEKPFQCRICMRKFAERSHLREHTKIHLRGSGGGGSGGSGGSAIPVKRGATGETKVFTGNSNSPKSPTKGGCSGGSTNLSDIIEKETGKQLVIQESILMLPEEVEEVIGNKPESDILVHTAYDESTDENVMLLTSDAPEYKPWALVIQDSNGENKIKML

SEQ ID NO: 183 - protein, 428 aa, Artificial Sequence
  Synthetic
MLGFVGRVAAAPASGALRRLTPSASLPPAQLLLRAAPTAVHPVRDYAAQDYKDDDDKVDEMTKKFGTLTIHDTEKAAMAERPFQCRICMRNFSRSDNLSTHIRTHTGEKPFACDICGRKFADRSDLSRHTKIHTGEKPFQCRICMRKFAQSGDLTRHTKIHTGSQKPFQCRICMRNFSRSDSLSAHIRTHTGEKPFACDICGRKFAQKATRITHTKIHLRGSGGGGSGGSGGSGSYALGPYQISAPQLPAYNGQTVGTFYYVNDAGGLESKVFSSGGPTPYPNYANAGHVEGQSALFMRDNGISEGLVFHNNPEGTCGFCVNMTETLLPENAKMTVVPPEGSGGSTNLSDIIEKETGKQLVIQESILMLPEEVEEVIGNKPESDILVHTAYDESTDENVMLLTSDAPEYKPWALVIQDSNGENKIKML

SEQ ID NO: 184 - protein, 350 aa, Artificial Sequence
  Synthetic
MLGFVGRVAAAPASGALRRLTPSASLPPAQLLLRAAPTAVHPVRDYAAQDYKDDDDKVDEMTKKFGTLTIHDTEKAAMAERPFQCRICMRNFSQSSSLVRHIRTHTGEKPFACDICGRKFARSDNLVRHTKIHTGSQKPFQCRICMRNFSQAGHLASHIRTHTGEKPFACDICGRKFARKDNLKNHTKIHTGEKPFQCRICMRKFARKDALRGHTKIHLRGSGGGGSGGSGGSAIPVKRGATGETKVFTGNSNSPKSPTKGGCSGGSTNLSDIIEKETGKQLVIQESILMLPEEVEEVIGNKPESDILVHTAYDESTDENVMLLTSDAPEYKPWALVIQDSNGENKIKML

SEQ ID NO: 185 - protein, 350 aa, Artificial Sequence
  Synthetic
MLGFVGRVAAAPASGALRRLTPSASLPPAQLLLRAAPTAVHPVRDYAAQDYKDDDDKVDEMTKKFGTLTIHDTEKAAMAERPFQCRICMRNFSRSDHLTTHIRTHTGEKPFACDICGRKFAQSSSLVRHTKIHTGSQKPFQCRICMRNFSRSDNLVRHIRTHTGEKPFACDICGRKFAQAGHLASHTKIHTGEKPFQCRICMRKFARKDNLKNHTKIHLRGSGGGGSGGSGGSAIPVKRGATGETKVFTGNSNSPKSPTKGGCSGGSTNLSDIIEKETGKQLVIQESILMLPEEVEEVIGNKPESDILVHTAYDESTDENVMLLTSDAPEYKPWALVIQDSNGENKIKML

SEQ ID NO: 186 - protein, 573 aa, Artificial Sequence
  Synthetic
DIADLRTLGYSQQQQEKIKPKVRSTVAQHHEALVGHGFTHAHIVALSQHPAALGTVAVKYQDMIAALPEATHEAIVGVGKQWSGARALEALLTVAGELRGPPLQLDTGQLLKIAKRGGVTAVEAVHAWRNALTGAPLNLTPEQVVAIASNIGGKQALETVQALLPVLCQAHGLTPQQVVAIASNGGGKQALETVQRLLPVLCQAHGLTPQQVVAIASNIGGKQALETVQRLLPVLCQAHGLTPEQVVAIASNGGGKQALETVQALLPVLCQAHGLTPEQVVAIASNIGGKQALETVQALLPVLCQAHGLTPEQVVAIASNNGGKQALETVQALLPVLCQAHGLTPEQVVAIASHDGGKQALETVQRLLPVLCQAHGLTPQQVVAIASHDGGKQALETVQALLPVLCQAHGLTPEQVVAIASNGGGKQALETVQRLLPVLCQAHGLTPEQVVAIASNIGGKQALETVQRLLPVLCQAHGLTPEQVVAIASNNGGKQALETVQALLPVLCQAHGLTPQQVVAIASNIGGRPALESIVAQLSRPDPALAALTNDHLVALACLGGRPALDAVKKGLG

SEQ ID NO: 187 - protein, 505 aa, Artificial Sequence
  Synthetic
DIADLRTLGYSQQQQEKIKPKVRSTVAQHHEALVGHGFTHAHIVALSQHPAALGTVAVKYQDMIAALPEATHEAIVGVGKQWSGARALEALLTVAGELRGPPLQLDTGQLLKIAKRGGVTAVEAVHAWRNALTGAPLNLTPEQVVAIASHDGGKQALETVQALLPVLCQAHGLTPQQVVAIASHDGGKQALETVQRLLPVLCQAHGLTPQQVVAIASNGGGKQALETVQRLLPVLCQAHGLTPEQVVAIASNIGGKQALETVQALLPVLCQAHGLTPEQVVAIASNIGGKQALETVQALLPVLCQAHGLTPEQVVAIASNGGGKQALETVQALLPVLCQAHGLTPEQVVAIASNNGGKQALETVQRLLPVLCQAHGLTPQQVVAIASHDGGKQALETVQALLPVLCQAHGLTPEQVVAIASNGGGKQALETVQRLLPVLCQAHGLTPQQVVAIASNGGGRPALESIVAQLSRPDPALAALTNDHLVALACLGGRPALDAVKKGLG

SEQ ID NO: 188 - protein, 573 aa, Artificial Sequence
  Synthetic
DIADLRTLGYSQQQQEKIKPKVRSTVAQHHEALVGHGFTHAHIVALSQHPAALGTVAVKYQDMIAALPEATHEAIVGVGKQWSGARALEALLTVAGELRGPPLQLDTGQLLKIAKRGGVTAVEAVHAWRNALTGAPLNLTPEQVVAIASNNGGKQALETVQALLPVLCQAHGLTPQQVVAIASNNGGKQALETVQRLLPVLCQAHGLTPQQVVAIASNNGGKQALETVQRLLPVLCQAHGLTPEQVVAIASHDGGKQALETVQALLPVLCQAHGLTPEQVVAIASNNGGKQALETVQALLPVLCQAHGLTPEQVVAIASNIGGKQALETVQALLPVLCQAHGLTPEQVVAIASNGGGKQALETVQRLLPVLCQAHGLTPEQVVAIASNGGGKQALETVQALLPVLCQAHGLTPQQVVAIASNIGGKQALETVQRLLPVLCQAHGLTPEQVVAIASNGGGKQALETVQRLLPVLCQAHGLTPQQVVAIASNNGGKQALETVQRLLPVLCQAHGLTPQQVVAIASNIGGRPALESIVAQLSRPDPALAALTNDHLVALACLGGRPALDAVKKGLG

SEQ ID NO: 189 - protein, 539 aa, Artificial Sequence
  Synthetic
DIADLRTLGYSQQQQEKIKPKVRSTVAQHHEALVGHGFTHAHIVALSQHPAALGTVAVKYQDMIAALPEATHEAIVGVGKQWSGARALEALLTVAGELRGPPLQLDTGQLLKIAKRGGVTAVEAVHAWRNALTGAPLNLTPEQVVAIASNNGGKQALETVQALLPVLCQAHGLTPQQVVAIASNIGGKQALETVQRLLPVLCQAHGLTPQQVVAIASNIGGKQALETVQRLLPVLCQAHGLTPEQVVAIASNNGGKQALETVQALLPVLCQAHGLTPEQVVAIASHDGGKQALETVQALLPVLCQAHGLTPEQVVAIASNGGGKQALETVQALLPVLCQAHGLTPEQVVAIASNGGGKQALETVQRLLPVLCQAHGLTPEQVVAIASHDGGKQALETVQALLPVLCQAHGLTPQQVVAIASNIGGKQALETVQRLLPVLCQAHGLTPQQVVAIASHDGGKQALETVQRLLPVLCQAHGLTPQQVVAIASHDGGRPALESIVAQLSRPDPALAALTNDHLVALACLGGRPALDAVKKGLG

SEQ ID NO: 190 - protein, 505 aa, Artificial Sequence
  Synthetic
DIADLRTLGYSQQQQEKIKPKVRSTVAQHHEALVGHGFTHAHIVALSQHPAALGTVAVKYQDMIAALPEATHEAIVGVGKQWSGARALEALLTVAGELRGPPLQLDTGQLLKIAKRGGVTAVEAVHAWRNALTGAPLNLTPEQVVAIASNNGGKQALETVQALLPVLCQAHGLTPQQVVAIASNNGGKQALETVQRLLPVLCQAHGLTPQQVVAIASHDGGKQALETVQRLLPVLCQAHGLTPEQVVAIASNGGGKQALETVQALLPVLCQAHGLTPEQVVAIASNNGGKQALETVQALLPVLCQAHGLTPEQVVAIASNGGGKQALETVQALLPVLCQAHGLTPEQVVAIASNGGGKQALETVQRLLPVLCQAHGLTPEQVVAIASNIGGKQALETVQALLPVLCQAHGLTPEQVVAIASHDGGKQALETVQRLLPVLCQAHGLTPQQVVAIASNGGGRPALESIVAQLSRPDPALAALTNDHLVALACLGGRPALDAVKKGLG

SEQ ID NO: 191 - protein, 573 aa, Artificial Sequence
  Synthetic
DIADLRTLGYSQQQQEKIKPKVRSTVAQHHEALVGHGFTHAHIVALSQHPAALGTVAVKYQDMIAALPEATHEAIVGVGKQWSGARALEALLTVAGELRGPPLQLDTGQLLKIAKRGGVTAVEAVHAWRNALTGAPLNLTPEQVVAIASHDGGKQALETVQALLPVLCQAHGLTPQQVVAIASNGGGKQALETVQRLLPVLCQAHGLTPQQVVAIASNGGGKQALETVQRLLPVLCQAHGLTPEQVVAIASHDGGKQALETVQALLPVLCQAHGLTPEQVVAIASNIGGKQALETVQALLPVLCQAHGLTPEQVVAIASNIGGKQALETVQALLPVLCQAHGLTPEQVVAIASNGGGKQALETVQRLLPVLCQAHGLTPEQVVAIASHDGGKQALETVQALLPVLCQAHGLTPQQVVAIASNIGGKQALETVQRLLPVLCQAHGLTPQQVVAIASNNGGKQALETVQRLLPVLCQAHGLTPEQVVAIASHDGGKQALETVQRLLPVLCQAHGLTPQQVVAIASHDGGRPALESIVAQLSRPDPALAALTNDHLVALACLGGRPALDAVKKGLG

SEQ ID NO: 192 - protein, 709 aa, Artificial Sequence
  Synthetic
DIADLRTLGYSQQQQEKIKPKVRSTVAQHHEALVGHGFTHAHIVALSQHPAALGTVAVKYQDMIAALPEATHEAIVGVGKQWSGARALEALLTVAGELRGPPLQLDTGQLLKIAKRGGVTAVEAVHAWRNALTGAPLNLTPQQVVAIASNNGGKQALETVQRLLPVLCQAHGLTPEQVVAIASHDGGKQALETVQRLLPVLCQAHGLTPQQVVAIASNGGGKQALETVQRLLPVLCQAHGLTPEQVVAIASNIGGKQALETVQALLPVLCQAHGLTPQQVVAIASNNGGKQALETVQRLLPVLCQAHGLTPQQVVAIASNNGGKQALETVQRLLPVLCQAHGLTPEQVVAIASHDGGKQALETVQRLLPVLCQAHGLTPQQVVAIASNGGGKQALETVQRLLPVLCQAHGLTPQQVVAIASNNGGKQALETVQRLLPVLCQAHGLTPEQVVAIASHDGGKQALETVQRLLPVLCQAHGLTPEQVVAIASHDGGKQALETVQRLLPVLCQAHGLTPEQVVAIASNIGGKQALETVQALLPVLCQAHGLTPEQVVAIASNIGGKQALETVQALLPVLCQAHGLTPQQVVAIASNGGGKQALETVQRLLPVLCQAHGLTPQQVVAIASNNGGKQALETVQRLLPVLCQAHGLTPQQVVAIASNNGGRPALESIVAQLSRPDPALAALTNDHLVALACLGGRPALDAVKKGLG

SEQ ID NO: 193 - protein, 471 aa, Artificial Sequence
  Synthetic
DIADLRTLGYSQQQQEKIKPKVRSTVAQHHEALVGHGFTHAHIVALSQHPAALGTVAVKYQDMIAALPEATHEAIVGVGKQWSGARALEALLTVAGELRGPPLQLDTGQLLKIAKRGGVTAVEAVHAWRNALTGAPLNLTPEQVVAIASNNGGKQALETVQALLPVLCQAHGLTPQQVVAIASHDGGKQALETVQRLLPVLCQAHGLTPQQVVAIASNGGGKQALETVQRLLPVLCQAHGLTPEQVVAIASNIGGKQALETVQALLPVLCQAHGLTPEQVVAIASNNGGKQALETVQALLPVLCQAHGLTPEQVVAIASNNGGKQALETVQALLPVLCQAHGLTPEQVVAIASNGGGKQALETVQRLLPVLCQAHGLTPEQVVAIASNNGGKQALETVQALLPVLCQAHGLTPQQVVAIASNGGGRPALESIVAQLSRPDPALAALTNDHLVALACLGGRPALDAVKKGLG

SEQ ID NO: 194 - protein, 641 aa, Artificial Sequence
  Synthetic
DIADLRTLGYSQQQQEKIKPKVRSTVAQHHEALVGHGFTHAHIVALSQHPAALGTVAVKYQDMIAALPEATHEAIVGVGKQWSGARALEALLTVAGELRGPPLQLDTGQLLKIAKRGGVTAVEAVHAWRNALTGAPLNLTPEQVVAIASHDGGKQALETVQALLPVLCQAHGLTPQQVVAIASNIGGKQALETVQRLLPVLCQAHGLTPQQVVAIASNGGGKQALETVQRLLPVLCQAHGLTPEQVVAIASNIGGKQALETVQALLPVLCQAHGLTPEQVVAIASNIGGKQALETVQALLPVLCQAHGLTPEQVVAIASNGGGKQALETVQALLPVLCQAHGLTPEQVVAIASNIGGKQALETVQRLLPVLCQAHGLTPEQVVAIASNNGGKQALETVQALLPVLCQAHGLTPEQVVAIASNGGGKQALETVQRLLPVLCQAHGLTPEQVVAIASNGGGKQALETVQALLPVLCQAHGLTPEQVVAIASNIGGKQALETVQALLPVLCQAHGLTPEQVVAIASHDGGKQALETVQRLLPVLCQAHGLTPQQVVAIASNIGGKQALETVQRLLPVLCQAHGLTPQQVVAIASNIGGRPALESIVAQLSRPDPALAALTNDHLVALACLGGRPALDAVKKGLG

SEQ ID NO: 195 - protein, 709 aa, Artificial Sequence
  Synthetic
DIADLRTLGYSQQQQEKIKPKVRSTVAQHHEALVGHGFTHAHIVALSQHPAALGTVAVKYQDMIAALPEATHEAIVGVGKQWSGARALEALLTVAGELRGPPLQLDTGQLLKIAKRGGVTAVEAVHAWRNALTGAPLNLTPEQVVAIASNIGGKQALETVQALLPVLCQAHGLTPQQVVAIASNGGGKQALETVQRLLPVLCQAHGLTPQQVVAIASNGGGKQALETVQRLLPVLCQAHGLTPEQVVAIASNIGGKQALETVQALLPVLCQAHGLTPEQVVAIASNIGGKQALETVQALLPVLCQAHGLTPEQVVAIASNIGGKQALETVQALLPVLCQAHGLTPEQVVAIASHDGGKQALETVQRLLPVLCQAHGLTPEQVVAIASNIGGKQALETVQALLPVLCQAHGLTPEQVVAIASHDGGKQALETVQRLLPVLCQAHGLTPEQVVAIASNIGGKQALETVQALLPVLCQAHGLTPEQVVAIASNIGGKQALETVQALLPVLCQAHGLTPEQVVAIASNIGGKQALETVQALLPVLCQAHGLTPEQVVAIASHDGGKQALETVQRLLPVLCQAHGLTPQQVVAIASNGGGKQALETVQRLLPVLCQAHGLTPEQVVAIASNIGGKQALETVQALLPVLCQAHGLTPQQVVAIASHDGGRPALESIVAQLSRPDPALAALTNDHLVALACLGGRPALDAVKKGLG

SEQ ID NO: 196 - protein, 899 aa, Artificial Sequence
  Synthetic
MNTINIAKNDFSDIELAAIPFNTLADHYGERLAREQLALEHESYEMGEARFRKMFERQLKAGEVADNAAAKPLITTLLPKMIARINDWFEEVKAKRGKRPTAFQFLQEIKPEAVAYITIKTTLACLTSADNTTVQAVASAIGRAIEDEARFGRIRDLKAKHFKKNVEEQLNKRVGHVYKKAFMQVVEADMLSKGLLGGEAWSSWHKEDSIHVGVRCIEMLIESTGMVSLHRQNAGVVGQDSETIELAPEYAEAIATRAGALAGISPMFQPCVVPPKPWTGITGGGYWANGRRPLALVRTHSKKALMRYEDVYMPEVYKAINIAQNTAWKINKKVLAVANVITKWKHCPVEDIPAIEREELPMKPEDIDMNPEALTAWKRAAAAVYRKDKARKSRRISLEFMLEQANKFANHKAIWFPYNMDWRGRVYAVSMFNPQGNDMTKGLLTLAKGKPIGKEGYYWLKIHGANCAGVDKVPFPERIKFIEENHENIMACAKSPLENTWWAEQDSPFCFLAFCFEYAGVQHHGLSYNCSLPLAFDGSCSGIQHFSAMLRDEVGGRAVNLLPSETVQDIYGIVAKKVNEILQADAINGTDNEVVTVTDENTGEISEKVKLGTKALAGQWLAYGVTRSVTKRSVMTLAYGSKEFGFRQQVLEDTIQPAIDSGKGLMFTQPNQAAGYMAKLIWESVSVTVVAAVEAMNWLKSAAKLLAAEVKDKKTGEILRKRCAVHWVTPDGFPVWQEYKKPIQTRLNLMFLGQFRLQPTINTNKDSEIDAHKQESGIAPNFVHSQDGSHLRKTVVWAHEKYGIESFALIHDSFGTIPADAANLFKAVRETMVDTYESCDVLADFYDQFADQLHESQLDKMPALPAKGNLNLRDILESDFAFAWTRAANDENYNYALAA

SEQ ID NO: 197 - protein, 346 aa, Artificial Sequence
  Synthetic
MSSETGPVAVDPTLRRRIEPHEFEVFFDPRELRKETCLLYEINWGGRHSIWRHTSQNTNKHVEVNFIEKFTTERYFCPNTRCSITWFLSWSPCGECSRAITEFLSRYPHVTLFIYIARLYHHADPRNRQGLRDLISSGVTIQIMTEQESGYCWRNFVNYSPSNEAHWPRYPHLWVRLYVLELYCIILGLPPCLNILRRKQPQLTFFTIALQSCHYQRLPPHILWATGLKSGSETPGTSESATPECLSYETEILTVEYGLLPIGKIVEKRIECTVYSVDNNGNIYTQPVAQWHDRGEQEVFEYCLEDGSLIRATKDHKFMTVDGQMLPIDEIFERELDLMRVDNLPN

SEQ ID NO: 198 - protein, 1492 aa, Artificial Sequence
  Synthetic
MIKIATRKYLGKQNVYDIGVERDHNFALKNGFIASNCFNKYSIGLAIGTNSVGWAVITDEYKVPSKKFKVLGNTDRHSIKKNLIGALLFDSGETAEATRLKRTARRRYTRRKNRICYLQEIFSNEMAKVDDSFFHRLEESFLVEEDKKHERHPIFGNIVDEVAYHEKYPTIYHLRKKLVDSTDKADLRLIYLALAHMIKFRGHFLIEGDLNPDNSDVDKLFIQLVQTYNQLFEENPINASGVDAKAILSARLSKSRRLENLIAQLPGEKKNGLFGNLIALSLGLTPNFKSNFDLAEDAKLQLSKDTYDDDLDNLLAQIGDQYADLFLAAKNLSDAILLSDILRVNTEITKAPLSASMIKRYDEHHQDLTLLKALVRQQLPEKYKEIFFDQSKNGYAGYIDGGASQEEFYKFIKPILEKMDGTEELLVKLNREDLLRKQRTFDNGSIPHQIHLGELHAILRRQEDFYPFLKDNREKIEKILTFRIPYYVGPLARGNSRFAWMTRKSEETITPWNFEEVVDKGASAQSFIERMTNFDKNLPNEKVLPKHSLLYEYFTVYNELTKVKYVTEGMRKPAFLSGEQKKAIVDLLFKTNRKVTVKQLKEDYFKKIECFDSVEISGVEDRFNASLGTYHDLLKIIKDKDFLDNEENEDILEDIVLTLTLFEDREMIEERLKTYAHLFDDKVMKQLKRRRYTGWGRLSRKLINGIRDKQSGKTILDFLKSDGFANRNFMQLIHDDSLTFKEDIQKAQVSGQGDSLHEHIANLAGSPAIKKGILQTVKVVDELVKVMGRHKPENIVIEMARENQTTQKGQKNSRERMKRIEEGIKELGSQILKEHPVENTQLQNEKLYLYYLQNGRDMYVDQELDINRLSDYDVDAIVPQSFLKDDSIDNKVLTRSDKNRGKSDNVPSEEVVKKMKNYWRQLLNAKLITQRKFDNLTKAERGGLSELDKAGFIKRQLVETRQITKHVAQILDSRMNTKYDENDKLIREVKVITLKSKLVSDFRKDFQFYKVREINNYHHAHDAYLNAVVGTALIKKYPKLESEFVYGDYKVYDVRKMIAKSEQEIGKATAKYFFYSNIMNFFKTEITLANGEIRKRPLIETNGETGEIVWDKGRDFATVRKVLSMPQVNIVKKTEVQTGGFSKESILPKRNSDKLIARKKDWDPKKYGGFDSPTVAYSVLVVAKVEKGKSKKLKSVKELLGITIMERSSFEKNPIDFLEAKGYKEVKKDLIIKLPKYSLFELENGRKRMLASAGELQKGNELALPSKYVNFLYLASHYEKLKGSPEDNEQKQLFVEQHKHYLDEIIEQISEFSKRVILADANLDKVLSAYNKHRDKPIREQAENIIHLFTLTNLGAPAAFKYFDTTIDRKRYTSTKEVLDATLIHQSITGLYETRIDLSQLGGDSGGSMTNLSDIIEKETGKQLVIQESILMLPEEVEEVIGNKPESDILVHTAYDESTDENVMLLTSDAPEYKPWALVIQDSNGENKIKML

SEQ ID NO: 199 - DNA, 83 bp, Artificial Sequence
  Synthetic
gttttagagctagaaatagcaagttaaaataaggctagtccgttatcaacttgaaaaagtggcaccgagtcggtgcttttttt

SEQ ID NO: 200 - protein, 102 aa, Artificial Sequence
  Synthetic
CLSYETEILTVEYGLLPIGKIVEKRIECTVYSVDNNGNIYTQPVAQWHDRGEQEVFEYCLEDGSLIRATKDHKFMTVDGQMLPIDEIFERELDLMRVDNLPN

SEQ ID NO: 201 - protein, 37 aa, Artificial Sequence
  Synthetic
MIKIATRKYLGKQNVYDIGVERDHNFALKNGFIASNC

SEQ ID NO: 202 - protein, 16 aa, Artificial Sequence
  Synthetic
SGSETPGTSESATPES

SEQ ID NO: 203 - protein, 32 aa, Artificial Sequence
  Synthetic
SGGSSGGSSGSETPGTSESATPESSGGSSGGS

SEQ ID NO: 204 - protein, 4 aa, Artificial Sequence
  Synthetic
  MOD_RES (1)..(4): May be repeated 1 to 30 times
SGGS

SEQ ID NO: 205 - protein, 4 aa, Artificial Sequence
  Synthetic
  MOD_RES (1)..(4): May be repeated 1 to 30 times
GGGS

SEQ ID NO: 206 - protein, 5 aa, Artificial Sequence
  Synthetic
  MOD_RES (1)..(5): May be repeated 1 to 30 times
GGGGS

SEQ ID NO: 207 - protein, 1 aa, Artificial Sequence
  Synthetic
  MOD_RES (1)..(1): May be repeated 1 to 30 times
G

SEQ ID NO: 208 - protein, 5 aa, Artificial Sequence
  Synthetic
  MOD_RES (1)..(5): May be repeated 1 to 30 times
EAAAK

SEQ ID NO: 209 - protein, 24 aa, Artificial Sequence
  Synthetic
  MOD_RES (1)..(4): May be repeated 1 to 30 times
  MOD_RES (21)..(24): May be repeated 1 to 30 times
SGGSSGSETPGTSESATPESSGGS

SEQ ID NO: 210 - protein, 3 aa, Artificial Sequence
  Synthetic
  MOD_RES (1)..(3): May be repeated 1 to 30 times
GGS

SEQ ID NO: 211 - protein, 2 aa, Artificial Sequence
  Synthetic
  misc_feature (1)..(1): Xaa can be any naturally occurring amino acid
  MOD_RES (1)..(2): May be repeated 1 to 30 times
XP

SEQ ID NO: 212 - protein, 24 aa, Artificial Sequence
  Synthetic
SGGSSGSETPGTSESATPESSGGS

SEQ ID NO: 213 - protein, 104 aa, Artificial Sequence
  Synthetic
GGSGGSPGSPAGSPTSTEEGTSESATPESGPGTSTEPSEGSAPGSPAGSPTSTEEGTSTEPSEGSAPGTSTEPSEGSAPGTSESATPESGPGSEPATSGGSGGS

SEQ ID NO: 214 - protein, 24 aa, Artificial Sequence
  Synthetic
SGGSSGGSSGSETPGTSESATPES

SEQ ID NO: 215 - protein, 40 aa, Artificial Sequence
  Synthetic
SGGSSGGSSGSETPGTSESATPESSGGSSGGSSGGSSGGS

SEQ ID NO: 216 - protein, 64 aa, Artificial Sequence
  Synthetic
SGGSSGGSSGSETPGTSESATPESSGGSSGGSSGGSSGGSSGSETPGTSESATPESSGGSSGGS

SEQ ID NO: 217 - protein, 92 aa, Artificial Sequence
  Synthetic
PGSPAGSPTSTEEGTSESATPESGPGTSTEPSEGSAPGSPAGSPTSTEEGTSTEPSEGSAPGTSTEPSEGSAPGTSESATPESGPGSEPATS

SEQ ID NO: 218 - protein, 10 aa, Artificial Sequence
  Synthetic
GGGGSGGGGS

SEQ ID NO: 219 - protein, 5 aa, Artificial Sequence
  Synthetic
EAAAK

SEQ ID NO: 220 - protein, 10 aa, Artificial Sequence
  Synthetic
SGGSGGSGGS

SEQ ID NO: 221 - protein, 4 aa, Artificial Sequence
  Synthetic
SGGS

SEQ ID NO: 222 - protein, 13 aa, Artificial Sequence
  Synthetic
GSGGGGSGGSGGS

SEQ ID NO: 223 - protein, 19 aa, Artificial Sequence
  Synthetic
ATNFSLLKQAGDVEENPGP

SEQ ID NO: 224 - protein, 143 aa, Artificial Sequence
  Synthetic
MAERPFQCDICMRNFSTSGSLSRHIRTHTGEKPFQCDICMRNFSQSGSLTRHIRTHTGSEKPFQCDICMRNFSRSDALSQHIRTHTGEKPFQCDICMRNFSRNDNRITHIRTHTGEKPFQCDICMRNFSRSDHLTQHTKIHLR

SEQ ID NO: 225 - protein, 143 aa, Artificial Sequence
  Synthetic
MAERPFQCDICMRNFSQASNLISHIRTHTGEKPFQCDICMRNFSTSHSLTEHIRTHTGSEKPFQCDICMRNFSERSHLREHIRTHTGEKPFQCDICMRNFSQSGNLTEHIRTHTGEKPFQCDICMRNFSSKKALTEHTKIHLR

SEQ ID NO: 226 - protein, 143 aa, Artificial Sequence
  Synthetic
MAERPFQCDICMRNFSQASNLISHIRTHTGEKPFQCDICMRNFSQRANLRAHIRTHTGSEKPFQCDICMRNFSQASNLISHIRTHTGEKPFQCDICMRNFSTSHSLTEHIRTHTGEKPFQCDICMRNFSERSHLREHTKIHLR

SEQ ID NO: 227 - protein, 143 aa, Artificial Sequence
  Synthetic
MAERPFQCDICMRNFSRSDNLSTHIRTHTGEKPFQCDICMRNFSDRSDLSRHIRTHTGEKPFQCDICMRNFSQSGDLTRHIRTHTGSEKPFQCDICMRNFSRSDSLSAHIRTHTGEKPFQCDICMRNFSQKATRITHTKIHLR

SEQ ID NO: 228 - protein, 143 aa, Artificial Sequence
  Synthetic
MAERPFQCDICMRNFSQSSSLVRHIRTHTGEKPFQCDICMRNFSRSDNLVRHIRTHTGSEKPFQCDICMRNFSQAGHLASHIRTHTGEKPFQCDICMRNFSRKDNLKNHIRTHTGEKPFQCDICMRNFSRKDALRGHTKIHLR

SEQ ID NO: 229 - protein, 143 aa, Artificial Sequence
  Synthetic
MAERPFQCDICMRNFSRSDHLTTHIRTHTGEKPFQCDICMRNFSQSSSLVRHIRTHTGSEKPFQCDICMRNFSRSDNLVRHIRTHTGEKPFQCDICMRNFSQAGHLASHIRTHTGEKPFQCDICMRNFSRKDNLKNHTKIHLR

SEQ ID NO: 230 - protein, 49 aa, Artificial Sequence
  Synthetic
MLGFVGRVAAAPASGALRRLTPSASLPPAQLLLRAAPTAVHPVRDYAAQ

SEQ ID NO: 231 - protein, 30 aa, Artificial Sequence
  Synthetic
MASVLTPLLLRGLTGSARRLPVPRAKIHSL

SEQ ID NO: 232 - protein, 18 aa, Artificial Sequence
  Synthetic
VDEMTKKFGTLTIHDTEK

SEQ ID NO: 233 - protein, 11 aa, Artificial Sequence
  Synthetic
LQKKLEELELD

SEQ ID NO: 234 - protein, 17 aa, Artificial Sequence
  Synthetic
KRTADGSEFEPKKKRKV

SEQ ID NO: 235 - protein, 32 aa, Artificial Sequence
  Synthetic
TAATGGAAACTTCCTCATGAAAAAGTCTTTAG

SEQ ID NO: 236 - protein, 30 aa, Artificial Sequence
  Synthetic
ACAGAGAGAATAACATAAAAACAGGGAAGC

SEQ ID NO: 237 - protein, 20 aa, Artificial Sequence
  Synthetic
CCAGCAAGGCCGATAGTTTG

SEQ ID NO: 238 - protein, 22 aa, Artificial Sequence
  Synthetic
CTAGCTGATAAATTCATGCCAG

SEQ ID NO: 239 - DNA, 60 bp, Artificial Sequence
  Synthetic
  misc_feature (34)..(37): n is a, c, g, or t
acactctttccctacacgacgctcttccgatctnnnnctcaccatcgctcttctactatg

SEQ ID NO: 240 - DNA, 57 bp, Artificial Sequence
  Synthetic
  misc_feature (34)..(37): n is a, c, g, or t
acactctttccctacacgacgctcttccgatctnnnngccaacctcctactcctcat

SEQ ID NO: 241 - DNA, 56 bp, Artificial Sequence
  Synthetic
  misc_feature (34)..(37): n is a, c, g, or t
acactctttccctacacgacgctcttccgatctnnnncgtaagccttctcctcact

SEQ ID NO: 242 - DNA, 64 bp, Artificial Sequence
  Synthetic
  misc_feature (34)..(37): n is a, c, g, or t
acactctttccctacacgacgctcttccgatctnnnngacttcaaactctactcccactaatag

SEQ ID NO: 243 - DNA, 57 bp, Artificial Sequence
  Synthetic
  misc_feature (34)..(37): n is a, c, g, or t
acactctttccctacacgacgctcttccgatctnnnnctgcctacgacaaacagacc

SEQ ID NO: 244 - DNA, 56 bp, Artificial Sequence
  Synthetic
  misc_feature (34)..(37): n is a, c, g, or t
acactctttccctacacgacgctcttccgatctnnnncgggtccatcatccacaac

SEQ ID NO: 245 - DNA, 54 bp, Artificial Sequence
  Synthetic
  misc_feature (34)..(37): n is a, c, g, or t
acactctttccctacacgacgctcttccgatctnnnngcagtctgcgcccttac

SEQ ID NO: 246 - DNA, 59 bp, Artificial Sequence
  Synthetic
  misc_feature (34)..(37): n is a, c, g, or t
acactctttccctacacgacgctcttccgatctnnnnctttacagtgaaatgccccaac

SEQ ID NO: 247 - DNA, 55 bp, Artificial Sequence
  Synthetic
  misc_feature (34)..(37): n is a, c, g, or t
acactctttccctacacgacgctcttccgatctnnnnggaagcggcctcaacaag

SEQ ID NO: 248 - DNA, 59 bp, Artificial Sequence
  Synthetic
  misc_feature (34)..(37): n is a, c, g, or t
acactctttccctacacgacgctcttccgatctnnnngctaggattacaggtgtgagac

SEQ ID NO: 249 - DNA, 62 bp, Artificial Sequence
  Synthetic
  misc_feature (34)..(37): n is a, c, g, or t
acactctttccctacacgacgctcttccgatctnnnncgttttagactgagcacgtcaatac

SEQ ID NO: 250 - DNA, 53 bp, Artificial Sequence
  Synthetic
  misc_feature (34)..(37): n is a, c, g, or t
acactctttccctacacgacgctcttccgatctnnnntggccaagcagggatc

SEQ ID NO: 251 - DNA, 58 bp, Artificial Sequence
  Synthetic
  misc_feature (34)..(37): n is a, c, g, or t
acactctttccctacacgacgctcttccgatctnnnngggggagtcggacttagaagg

SEQ ID NO: 252 - DNA, 57 bp, Artificial Sequence
  Synthetic
  misc_feature (34)..(37): n is a, c, g, or t
acactctttccctacacgacgctcttccgatctnnnntgctaggccccgatttgtgg

SEQ ID NO: 253 - DNA, 61 bp, Artificial Sequence
  Synthetic
  misc_feature (34)..(37): n is a, c, g, or t
acactctttccctacacgacgctcttccgatctnnnngacccttccattagatctgagggc

SEQ ID NO: 254 - DNA, 58 bp, Artificial Sequence
  Synthetic
  misc_feature (34)..(37): n is a, c, g, or t
acactctttccctacacgacgctcttccgatctnnnnggatccaaggtgccttcaccc

SEQ ID NO: 255 - DNA, 61 bp, Artificial Sequence
  Synthetic
  misc_feature (34)..(37): n is a, c, g, or t
acactctttccctacacgacgctcttccgatctnnnngctggattcgatctgaggtcagct

SEQ ID NO: 256 - DNA, 61 bp, Artificial Sequence
  Synthetic
  misc_feature (34)..(37): n is a, c, g, or t
acactctttccctacacgacgctcttccgatctnnnncccaggacaaagttgctttggggc

SEQ ID NO: 257 - DNA, 58 bp, Artificial Sequence
  Synthetic
  misc_feature (34)..(37): n is a, c, g, or t
acactctttccctacacgacgctcttccgatctnnnngcctcgccaagaaacgcccat

SEQ ID NO: 258 - DNA, 56 bp, Artificial Sequence
  Synthetic
  misc_feature (34)..(37): n is a, c, g, or t
acactctttccctacacgacgctcttccgatctnnnnccagcacaccctgataagc

SEQ ID NO: 259 - DNA, 56 bp, Artificial Sequence
  Synthetic
  misc_feature (34)..(37): n is a, c, g, or t
acactctttccctacacgacgctcttccgatctnnnnccagggcaacaggtttaag

SEQ ID NO: 260 - DNA, 61 bp, Artificial Sequence
  Synthetic
  misc_feature (34)..(37): n is a, c, g, or t
acactctttccctacacgacgctcttccgatctnnnngtgtggtcaggacaaactgttccc

SEQ ID NO: 261 - DNA, 58 bp, Artificial Sequence
  Synthetic
  misc_feature (34)..(37): n is a, c, g, or t
acactctttccctacacgacgctcttccgatctnnnnggggctgggagaagagaggaa

SEQ ID NO: 262 - DNA, 60 bp, Artificial Sequence
  Synthetic
  misc_feature (34)..(37): n is a, c, g, or t
acactctttccctacacgacgctcttccgatctnnnngtccactctgtgttacccagatc

SEQ ID NO: 263 - DNA, 60 bp, Artificial Sequence
  Synthetic
  misc_feature (34)..(37): n is a, c, g, or t
acactctttccctacacgacgctcttccgatctnnnngccggtttaggtatgggaaccac

SEQ ID NO: 264 - DNA, 65 bp, Artificial Sequence
  Synthetic
  misc_feature (34)..(37): n is a, c, g, or t
acactctttccctacacgacgctcttccgatctnnnnggaacagtgatcagttctgttacctgac

SEQ ID NO: 265 - DNA, 58 bp, Artificial Sequence
  Synthetic
  misc_feature (34)..(37): n is a, c, g, or t
acactctttccctacacgacgctcttccgatctnnnntccggattctcctgctgaggc

SEQ ID NO: 266 - DNA, 57 bp, Artificial Sequence
  Synthetic
  misc_feature (34)..(37): n is a, c, g, or t
acactctttccctacacgacgctcttccgatctnnnnccgactgctctgccttctga

SEQ ID NO: 267 - DNA, 57 bp, Artificial Sequence
  Synthetic
  misc_feature (34)..(37): n is a, c, g, or t
acactctttccctacacgacgctcttccgatctnnnngtccatgaatgacagagcac

SEQ ID NO: 268 - DNA, 62 bp, Artificial Sequence
  Synthetic
  misc_feature (34)..(37): n is a, c, g, or t
acactctttccctacacgacgctcttccgatctnnnngtaagggtgaaaattcatttgatgg

SEQ ID NO: 269 - DNA, 51 bp, Artificial Sequence
  Synthetic
tggagttcagacgtgtgctcttccgatctggctagggtgacttcatatgag

SEQ ID NO: 270 - DNA, 47 bp, Artificial Sequence
  Synthetic
tggagttcagacgtgtgctcttccgatctgggcggtgatgtagaggg

SEQ ID NO: 271 - DNA, 52 bp, Artificial Sequence
  Synthetic
tggagttcagacgtgtgctcttccgatctgttgagtagtaggaatgcggtag

SEQ ID NO: 272 - DNA, 53 bp, Artificial Sequence
  Synthetic
tggagttcagacgtgtgctcttccgatctgttgtggtaaatatgtagagggag

SEQ ID NO: 273 - DNA, 50 bp, Artificial Sequence
  Synthetic
tggagttcagacgtgtgctcttccgatcttgggagtagagtttgaagtcc

SEQ ID NO: 274 - DNA, 52 bp, Artificial Sequence
  Synthetic
tggagttcagacgtgtgctcttccgatctagagtaatagatagggctcaggc

SEQ ID NO: 275 - DNA, 56 bp, Artificial Sequence
  Synthetic
tggagttcagacgtgtgctcttccgatctcgaatatcttgttcattgttaaggttg

SEQ ID NO: 276 - DNA, 48 bp, Artificial Sequence
  Synthetic
tggagttcagacgtgtgctcttccgatctgggggcaatgaatgaagcg

SEQ ID NO: 277 - DNA, 47 bp, Artificial Sequence
  Synthetic
tggagttcagacgtgtgctcttccgatctgccccctgatattcccac

SEQ ID NO: 278 - DNA, 53 bp, Artificial Sequence
  Synthetic
tggagttcagacgtgtgctcttccgatctcacctgaagaactggatctatttg

SEQ ID NO: 279 - DNA, 43 bp, Artificial Sequence
  Synthetic
tggagttcagacgtgtgctcttccgatctcggatgccgggagc

SEQ ID NO: 280 - DNA, 48 bp, Artificial Sequence
  Synthetic
tggagttcagacgtgtgctcttccgatctctgttgcctccttgggtac

SEQ ID NO: 281 - DNA, 50 bp, Artificial Sequence
  Synthetic
tggagttcagacgtgtgctcttccgatctcttggcacacagcaggtgctc

SEQ ID NO: 282 - DNA, 50 bp, Artificial Sequence
  Synthetic
tggagttcagacgtgtgctcttccgatctccccacttccttcctcaccct

SEQ ID NO: 283 - DNA, 50 bp, Artificial Sequence
  Synthetic
tggagttcagacgtgtgctcttccgatctgctctggctggagcacaggaa

SEQ ID NO: 284 - DNA, 50 bp, Artificial Sequence
  Synthetic
tggagttcagacgtgtgctcttccgatctaccacagagcctcacccacca

SEQ ID NO: 285 - DNA, 50 bp, Artificial Sequence
  Synthetic
tggagttcagacgtgtgctcttccgatctcaggccctactgggacgaaca

SEQ ID NO: 286 - DNA, 52 bp, Artificial Sequence
  Synthetic
tggagttcagacgtgtgctcttccgatctctcttgcacaaggttgccacctc

SEQ ID NO: 287 - DNA, 50 bp, Artificial Sequence
  Synthetic
tggagttcagacgtgtgctcttccgatctattccgggtaggcgaggaggt

SEQ ID NO: 288 - DNA, 45 bp, Artificial Sequence
  Synthetic
tggagttcagacgtgtgctcttccgatctagggccccagtgagtg

SEQ ID NO: 289 - DNA, 46 bp, Artificial Sequence
  Synthetic
tggagttcagacgtgtgctcttccgatctgcccacatcagctctgc

SEQ ID NO: 290 - DNA, 50 bp, Artificial Sequence
  Synthetic
tggagttcagacgtgtgctcttccgatctctccagcctgggcgactgaat

SEQ ID NO: 291 - DNA, 52 bp, Artificial Sequence
  Synthetic
tggagttcagacgtgtgctcttccgatctccactgataacctatgcccagga

SEQ ID NO: 292 - DNA, 59 bp, Artificial Sequence
  Synthetic
tggagttcagacgtgtgctcttccgatctctatggagactccttcaggtcttttttccc

SEQ ID NO: 293 - DNA, 51 bp, Artificial Sequence
  Synthetic
tggagttcagacgtgtgctcttccgatctgagtgagaccctgtcttgggga

SEQ ID NO: 294 - DNA, 59 bp, Artificial Sequence
  Synthetic
tggagttcagacgtgtgctcttccgatctggctctgaagaaagtacgtaaaagaccaag

SEQ ID NO: 295 - DNA, 52 bp, Artificial Sequence
  Synthetic
tggagttcagacgtgtgctcttccgatctcccaggacagctttgaatgtggc

SEQ ID NO: 296 - DNA, 51 bp, Artificial Sequence
  Synthetic
tggagttcagacgtgtgctcttccgatctgcccatgtattggggcataacc

SEQ ID NO: 297 - DNA, 47 bp, Artificial Sequence
  Synthetic
tggagttcagacgtgtgctcttccgatctgctctggctcttgcagac

SEQ ID NO: 298 - DNA, 51 bp, Artificial Sequence
  Synthetic
tggagttcagacgtgtgctcttccgatctcaagttcctggaatgctgcatg

SEQ ID NO: 299 - DNA, 207 bp, Artificial Sequence
  Synthetic
ctcaccatcgctcttctactatgaacccccctccccatacccaaccccctggtcaacctcaacctaggcctcctatttattctagccacctctagcctagccgtttactcaatcctctgatcagggtgagcatcaaactcaaactacgccctgatcggcgcactgcgagcagtagcccaaacaatctcatatgaagtcaccctagcc

SEQ ID NO: 300 - DNA, 214 bp, Artificial Sequence
  Synthetic
gccaacctcctactcctcattgtacccattctaatcgcaatggcattcctaatgcttaccgaacgaaaaattctaggctatatacaactacgcaaaggccccaacgttgtaggcccctacgggctactacaacccttcgctgacgccataaaactcttcaccaaagagcccctaaaacccgccacatctaccatcaccctctacatcaccgccc

SEQ ID NO: 301 - DNA, 211 bp, Artificial Sequence
  Synthetic
cgtaagccttctcctcactctctcaatcttatccatcatagcaggcagttgaggtggattaaaccaaacccagctacgcaaaatcttagcatactcctcaattacccacataggatgaataatagcagttctaccgtacaaccctaacataaccattcttaatttaactatttatattatcctaactactaccgcattcctactactcaac

SEQ ID NO: 302 - DNA, 202 bp, Artificial Sequence
  Synthetic
gacttcaaactctactcccactaatagctttttgatgacttctagcaagcctcgctaacctcgccttaccccccactattaacctactgggagaactctctgtgctagtaaccacgttctcctgatcaaatatcactctcctacttacaggactcaacatactagtcacagccctatactccctctacatatttaccacaac

SEQ ID NO: 303 - DNA, 235 bp, Artificial Sequence
  Synthetic
ctgcctacgacaaacagacctaaaatcgctcattgcatactcttcaatcagccacatagccctcgtagtaacagccattctcatccaaaccccctgaagcttcaccggcgcagtcattctcataatcgcccacggacttacatcctcattactattctgcctagcaaactcaaactacgaacgcactcacagtcgcatcataatcctctctcaaggacttcaaactctactccca

SEQ ID NO: 304 - DNA, 210 bp, Artificial Sequence
  Synthetic
cgggtccatcatccacaaccttaacaatgaacaagatattcgaaaaataggaggactactcaaaaccatacctctcacttcaacctccctcaccattggcagcctagcattagcaggaatacctttcctcacaggtttctactccaaagaccacatcatcgaaaccgcaaacatatcatacacaaacgcctgagccctatctattactct

SEQ ID NO: 305 - DNA, 206 bp, Artificial Sequence
  Synthetic
gcagtctgcgcccttacacaaaatgacatcaaaaaaatcgtagccttctccacttcaagtcaactaggactcataatagttacaatcggcatcaaccaaccacacctagcattcctgcacatctgtacccacgccttcttcaaagccatactatttatgtgctccgggtccatcatccacaaccttaacaatgaacaagatattcg

SEQ ID NO: 306 - DNA, 209 bp, Artificial Sequence
  Synthetic
ctttacagtgaaatgccccaactaaatactaccgtatggcccaccataattacccccatactccttacactattcctcatcacccaactaaaaatattaaacacaaactaccacctacctccctcaccaaagcccataaaaataaaaaattataacaaaccctgagaaccaaaatgaacgaaaatctgttcgcttcattcattgccccc

SEQ ID NO: 307 - DNA, 211 bp, Artificial Sequence
  Synthetic
ggaagcggcctcaacaagggaaactttattgttcccgtggggcagtcgaggatgtcggtgaattacgcggcggggctgtcgccgtacgcggacaagggcaagtgcggcctcccggaggtgagcgcgtctgagggtcccgagcatcgcgccccagggccgcgggctgggagcggccggatggcaggggggcattgtgggaatatcagggggc

SEQ ID NO: 308 - DNA, 213 bp, Artificial Sequence
  Synthetic
gctaggattacaggtgtgagacactgcgcccagcccatttgtaactttattgttttctcttacaggcaaatgttctgaaaaagactctgcatgggaatggcctgccttacgatgacagaaatggagggaacatccacctcttctatatatcagaatggtgatatttctggaaatgccaattctatgaagcaaatagatccagttcttcaggtg

SEQ ID NO: 309 - DNA, 197 bp, Artificial Sequence
  Synthetic
cgttttagactgagcacgtcaatacgcaaaccgcctctccccgcgcgttggccgattcattaatgcagctggcacgacaggtttcccgactggagtttgtagtctagtctgtccgacttcgcgttttttttgtttatttcagcaaacgacgaacccgccaaacgcgccctgacgggattgtctgctcccggcatccg

SEQ ID NO: 310 - DNA, 368 bp, Artificial Sequence
  Synthetic
tggccaagcagggatcacgtccctctgccttggccactccaggccacctgcagagggggcagccctgtcagtgatggagggggagacagcctgtgttattcacgccggaagtccatggcattctcagagagctcttccccgtacctccccagaacactgagaatggatgaatcagtcccggctcatcagagcctttcatgctaaaccagcccaaatgactgatttagaaactgcgtggtcttgttctttgagtggatttctgaggcacactccagagcaggcccaggtcttcattatctccatgcacaccctttgattaagcatctgtgaccacacagcactgtgtgctgtacccaaggaggcaacag

SEQ ID NO: 311 - DNA, 327 bp, Artificial Sequence
  Synthetic
gggggagtcggacttagaaggttgcctctgctgctctcccactaagaacaatgcagctgcccaggaaacacacccgagctatgaataggctcaagcacacagggcgaagctgtcgcatttctgccgtttagaaaggatctctagtgtgaagttgcttggaggctctgattttgcaaacccaattaaatatagatttctttggggtgacggttgggaagggtgtgggtggaatgtatgtctgtgctgcaatgcaatttaatcctgaaagtttcagcaaacctattcacacactccataaacatttctgagcacctgctgtgtgccaag

SEQ ID NO: 312 - DNA, 411 bp, Artificial Sequence
  Synthetic
tgctaggccccgatttgtggacactgagctaggcaaaaggatatataaagagatgcaagctagaggaggggaaagttctggatggggacctcattggcctcctcacctctgtagacccacgtcttgggttgacccagggtagaaccctataaggatttgttcaataaacgaatgcatagagactgatcaacaactgacaaagtggtattttacagatgccgtgaaagcagcatacaagccggagagcctactggaagcaagaggggaaaacccagccgggtatgggggctgcggggaggatgccaggtggcggagactggattcaggatttgatgcttgaactgaaccttcttttaagaggtgagtgggctgggaggttgtgatgcccagagggtgaggaaggaagtgggg

SEQ ID NO: 313 - DNA, 334 bp, Artificial Sequence
  Synthetic
gacccttccattagatctgagggcggggtgggagggcagaggaggggaggacagagaagtgggaggaagcaggagagggggtggaggggtaggggcacagtgtcatgcctctcgggcttcccccacagggtgaatgactgtgtgctgcgggtgaatgaggtggacgtgtcggaggtggtacacagccgggcggtggaggcgctgaaggaggcaggccctgtggtgcgattggtggtgcggaggcgacagcctccacccgagaccatcatggaggtcaacctgctcaaagggcccaaaggtgcggccctccaggttcctgtgctccagccagagc

SEQ ID NO: 314 - DNA, 332 bp, Artificial Sequence
  Synthetic
ggatccaaggtgccttcaccctgcggcctgctctatgagggcctgcgtcgcacatcagctgttggtatcctcacctcgctgagccgttcctccgagtgtgctctgtggcttgcaccaggcctagctgggccttgtgtctggtctcatccagcgtcttctgattgtggggaatgaggcagaggtctccccacctgggctgtccgtgtggcgaaagccttccggggggagggagaggaagtgcctctacaagggcctagagtcgtcctgtggcactgagggctctggcagctgcacacaggttgataatgtcactggtgggtgagctctgtggt

SEQ ID NO: 315 - DNA, 403 bp, Artificial Sequence
  Synthetic
gctggattcgatctgaggtcagcttgacttttccttcaggatgatgcgctgcttcctctgatgaaggatcagggatgcagaatgggactgatgtatctgtccaatcatcccactcattctcctcactttgcatgctcttctcggggccatctacagacaggtgaggggccccaggcagacagctccttgggacactgagctccacattgaaatgttactcaaatgaatgcgcagaggagctgtgagtgagaaagtaagccctccagcgtgaagagccccggaaaagccacccttgctctggcacctgtcatgcagccctcacagcagtactcccatggggtatgggaggacaggggcacttctgttggtctttccttcctcatgttcgtcccagtagggcctg

SEQ ID NO: 316 - DNA, 343 bp, Artificial Sequence
  Synthetic
cccaggacaaagttgctttggggcgcttacaggttgaatcacccatagctatgttttgtttggcttgtactgtgttgtttacattattttattagttggcaatagctttaaatcaaaatttacattaaggtccagatttggggctcctcttaaaaaaataaatcagcacatctacaacagtaggattttcacgcccaatggcaaaatctgttaaagctgtgtgacagcttctccttttaatggagatgacctcttcagaccctgtactccaggtgccacaggaaccagctgcccggttcatccttgtgtgttacctgcatgaggtggcaaccttgtgcaagag

SEQ ID NO: 317 - DNA, 473 bp, Artificial Sequence
  Synthetic
gcctcgccaagaaacgcccatttatttccttcctatttatttattttgcaaaagccgccttttgaaagccggagtgcagtgcggactggctgaggccggggcccaggcgcgcgcctccttcctgcaggcggcccggggcatcgatcgcgcggggcgtaatgaaccctaataacagctctatcaccgcccgcccgccaattggcccgggtgccctccaaattagccacaaagaagccagtctgtcaatattaattccgccgcggagattacttgttgtgggagaacaaaggtgttctggcttgagctgaacaacttaactccttgtctcataaaatttaagctgctattgatcgcctccttgcattgtgtgaggattaaacacgtgcgcgtgcacatccaggcacacgcgcgcacacactcggggcgcccggccccgctcaggcagccgccccacctcctcgcctacccggaat

SEQ ID NO: 318 - DNA, 327 bp, Artificial Sequence
  Synthetic
ccagcacaccctgataagcaggattcagattgggcatgggacaggacaaaggctctgaggaggcatgagtggagtagtagagagaacacaggactctgggttctgagccaagctctgccatcctgcagccatctgacccctggccaggccttcccccaacttcctcagctgtgaaacgcggcagggctgcagatgacgtaggtgggcagaggccctctggtgcctactgctagacacccttctactctggtgggagaccttgtgctcaaacgctctcagaagtcagggcagttgggagtccaggtcacacacactcactggggccct

SEQ ID NO: 319 - DNA, 358 bp, Artificial Sequence
  Synthetic
ccagggcaacaggtttaagacccattaggagacaatattgtcgtcatgaatataaatgaggcctaggcaggttgggagtagctagtgtcttggctctggcacaaccaggccctgttcctccacagggctggccagggcagaggtgaaaggggctggggtgtgaccgagtgagctggggtagaggtagaaaaagggacacagaacatcccaggcctaagctacatggagtatgagagaacagctggaatgtgctctagaagccctgggagaaggcctcagttgaggctgaattcagatatgcctgggacccggtctctgttaagagaccccggagagctggtgcagagctgatgtgggc

SEQ ID NO: 320 - DNA, 406 bp, Artificial Sequence
  Synthetic
gtgtggtcaggacaaactgttccctgaacttaaaaggtgaaggacaagaccccatattattatcctgtattaaaaaaggaaatatacatatatgtacacagacaccccatatcacagacaagaaacttcccataattcaaagggagaccatttccttattagcaaaggtgcgcattacagtatttcatgacagttaaaaattacacacctaccacctgttttggtcaatcttgctaaaaaagacactgaaatagacaattttcttctttaaggtaaagacaatgtctaatttagaaaatcttcctcttgagattgcacagtgaaaggtatcagttaattaaatataaaagcttaccgtttttgtttttttttgagacagagttttattcagtcgcccaggctggag

SEQ ID NO: 321 - DNA, 332 bp, Artificial Sequence
  Synthetic
ggggctgggagaagagaggaatgggagttattgataatgggtacagtttcagtttgaaaagatgaaaaattctgaagatggatggtggtagtgattatacaacaatgtgaatatacttaatgctgctgaactatacagtttaaaatggttaaatggtacattttatgtatacgttaccataaaaaaaaaagtctggactataatgttagaagtaaagatagtagtaatcttataggagaaagaagaggatggtgttcagaaagagcgtggtgagggtggggaacttcaagggtgctggcaatattctattcctgggcataggttatcagtgg

SEQ ID NO: 322 - DNA, 377 bp, Artificial Sequence
  Synthetic
gtccactctgtgttacccagatcttgtacaggaaatggagtgtatttaatattgatgactctgtatgtgtcatttaattgtctctattgattggatttcatcagagtgtggggcttggacagagctttgattagactgtaaggattctttgccgttttcttttttccgacaccatatcaatgtaccttctggtgtgatatcactttcacaatcaatatctgaaaaaagctctgcacacaggcctgcaggaaaagagagaaggcactgcctctaagtccccttatacacatagatttaacctctccaattgaaaaaggtttattgcatgttttagagcaggatggagtgggaaaaaagacctgaaggagtctccatag

SEQ ID NO: 323 - DNA, 411 bp, Artificial Sequence
  Synthetic
gccggtttaggtatgggaaccacacaacctctaaagtgaaggaggcttctccagcaaaaccgaacggcatattcagatgctgggtgaggattcataatatttagctattttgttaattaatataacagtaatttctttattcagtcacagaaacatcaatgtatctatgctgaagcaccataattttataagcacagttattgggggaaaatgttacctttttgtcctaaaaagactctccacgcatgtagctagggaaagctaaggtcagtggcagagttatatgcacacctccaccaccaacatcaccaccaccacctcctccttcatctctcatccagctctgccttaggcccttttttttcttttcttttcttttcttttttttttccccaagacagggtctcactc

SEQ ID NO: 324 - DNA, 391 bp, Artificial Sequence
  Synthetic
ggaacagtgatcagttctgttacctgaccataatggctaaacaaaacaaccaaattataaattaaaaggggtttgaatatatagaacattcatttttcagctactagccaaaaaatactatctctacctgctatcccatgtgttgtgttctttttagactgtctaattttgagctgaactgtttcttagactgacagacaagtcataaatcaagtgattgctataaatgctttttatttatatagagagtgtctcagatttttacctttctttcataaacttgtcataaatttctaattcaccaatagatggttggtgtccatttttcttgagtctaagacacttttaaaaatttacttgacttggtcttttacgtactttcttcagagcc

SEQ ID NO: 325 - DNA, 349 bp, Artificial Sequence
  Synthetic
tccggattctcctgctgaggcaggagaatcgcttgaagctgggaggcagagattgcagtgagctaagatcaggccattgcactccagcctgggtgacagagcgagactctgtctcaaaaaaacaaaacaaaacaaaaaaaaagagaaagtcagtagcatgtagatcaggagtgtccaatcttttggctcctctggaagaagaattgtcttgggccacacataaaatacaccatcacctaacgatagctgatgagcttaaaaaaaatcacagaaaaatatcataatgttttaagaatgtttatgaattttttacaaatttctgttgggccacattcaaagctgtcctggg

SEQ ID NO: 326 - DNA, 461 bp, Artificial Sequence
  Synthetic
ccgactgctctgccttctgaatcatatgtaaccaaatcaagtcaaacaggttagaagacaactcacacttcagtgtcatctgtactcttatcttcatgagtgtgggaatgtacaatccactttcgctcactatattaattcattctggttcctcatgtacttaacctatttttattttttcagtttggatacaacccaaatcctctcaagccttttaaatgcaaaaaaaaaaaataaatttaaagtatatgtagttaaaaatactcatgtctttacccattcctttgagaatttctgtagaggctttctcaaaatgcagagagtggaggcagtcataacatatgatgcctgcagattggggtatctgtcatttaatcaagagaagaaataaacattttatgtcattgatttatccattttagttgctatcatctttataggttatgccccaatacatgggc

SEQ ID NO: 327 - DNA, 382 bp, Artificial Sequence
  Synthetic
gtccatgaatgacagagcacattcacactcattcatttacatattttctatgcctgttttttatgctaaatctgtagagtttagtaatggcaaaagataccgtatggtccacaaggcctaaaatagctactatctgtaccttacagaaaaaaaaaaagagctgactctttttctgacctctggtctaagtcaagtctgtcccacaagacacaaggtacaatgctttttccacatgaggtcaggaagaatctcaaaactacagagtcaggcctcacattatcaataggaccatcctagccttctgcaagctttcaggctttagtcaaagctggcacattttcagtgaatccttagtccactggtggtctgcaagagccagagc

SEQ ID NO: 328 - DNA, 360 bp, Artificial Sequence
  Synthetic
gtaagggtgaaaattcatttgatggaaatacttgtgtatatttaaagacccaattgctcctctggagcttgtactttcaagaatgattaatctgtgtaataaactggttactacagtcattacatataattttgtgtgaataggctttttcatttttaagaagtttgtctagctgagattagtggtggattttctcccacttctgaaatgttcatttatactggttgcattttaagatcatgaaacaattccagttacattgtaaaaaggatatcttacgagtaattttattgaacaagttagaggcataagcttaagagcatttccatgaaacaacacatgcagcattccaggaacttg

SEQ ID NO: 329 - DNA, 324 bp, Artificial Sequence
  Synthetic
ggcagctacgccctgggtccgtatcagattagcgccccgcagctgccagcttacaatggtcagaccgtgggtaccttctactatgtgaacgacgcgggcggtctggagagcaaggtgtttagcagcggcggtccaaccccgtacccaaactatgccaatgccggtcatgtggagggtcagagcgccctgttcatgcgtgataacggcatcagcgagggtctggtgttccacaacaacccggaaggcacctgcggtttttgcgtgaacatgaccgagaccctgctgccggaaaacgcgaaaatgaccgtggtgccgccggaaggt

SEQ ID NO: 330 - DNA, 90 bp, Artificial Sequence
  Synthetic
gccattccagtgaagcgcggcgctaccggtgaaaccaaagtgtttaccggtaacagcaacagcccgaagagcccgaccaaaggcggttgc

SEQ ID NO: 331 - DNA, 3780 bp, Artificial Sequence
  Synthetic
ggcagctacgccctgggtccgtatcagattagcgccccgcagctgccagcttacaatggtcagaccgtgggtaccttctactatgtgaacgacgcgggcggtctggagagcaaggtgtttagcagcggcggttctggtggttcttctggtggttctagcggcagcgagactcccgggacctcagagtccgccacacccgaaagtagtggcggcagcagcggcggcagcgggaaacggaactacatcctggggcttgccattgggataaccagcgttggctacggaattattgattatgagacacgcgatgtgattgacgccggggttaggctgttcaaagaggccaacgttgaaaacaacgagggaagacggagtaagcgcggagcaagaagactcaagcgcagacggagacatcggattcagagggtgaaaaagctgctcttcgattacaatctcctgaccgatcatagtgagctgagcggaatcaacccctacgaggcgcgagtgaaagggctttcccagaagctgtccgaagaggagttctccgccgcgttgctgcacctggccaaacggaggggggttcacaatgtaaacgaagtggaggaggacacgggcaatgaacttagtacgaaagaacagatcagtaggaactctaaggctctcgaagagaaatacgtcgctgagttgcagcttgagagactgaaaaaagacggcgaagtacgcggatctattaataggttcaagacttcagattacgtaaaggaagccaagcagctcctgaaagtacagaaagcgtaccatcagctcgatcagagcttcatcgatacctacatagatttgctggagacacggaggacatactacgagggcccaggggaaggatctccttttgggtggaaggacatcaaggaatggtacgagatgcttatgggacattgtacatattttccggaggagctcaggagcgtcaagtacgcctacaatgccgacctgtacaatgccctcaatgacctcaataacctcgtgattaccagggacgagaacgagaagctggagtactatgaaaagttccagattatcgagaatgtgtttaagcagaagaagaagccgacacttaagcagattgcaaaggaaatcctcgtgaatgaggaagatatcaagggatacagagtgacaagtacaggcaagcccgagttcacaaatctgaaggtgtaccacgatattaaggacataaccgcacgaaaggagataatcgaaaacgctgagctcctcgatcagatcgcaaaaattcttaccatctaccagtctagtgaggacattcaggaggaactgactaatctgaacagtgagctcacccaagaggaaattgagcagatttcaaacctgaaaggctacaccgggacgcacaatctgagcctcaaagcaatcaacctcattctggatgaactttggcacacaaatgacaaccaaattgccatattcaaccgcctgaaactggtgccaaaaaaagtggatctgtcacagcaaaaggaaatccctacaaccttggttgacgattttattctgtcccccgttgtcaagcggagcttcatccagtcaatcaaggtgatcaatgccatcattaaaaaatacggattgccaaacgatataattatcgagcttgcacgagagaagaactcaaaggacgcccagaagatgattaacgaaatgcagaagcgcaaccgccagacaaacgaacgcatagaggaaattataagaacaaccggcaaagagaatgccaagtatctgatcgagaaaatcaagctgcacgacatgcaagaaggcaagtgcctgtactctctggaagctatcccactcgaagatctgctgaataatccattcaattacgaggtggaccacatcatccctagatccgtaagctttgacaattccttcaataacaaagttctggttaaacaggaggaaaattctaaaaaagggaaccggaccccgttccagtacctgagctccagtgacagcaagattagctacgagacttttaagaaacatattctgaatctggccaaaggcaaaggcaggatcagcaagaccaagaaggagtacctcctcgaagaacgcgacattaacagatttagtgtgcagaaagatttcatcaaccgaaaccttgtcgatactcggtacgccacgagaggcctgatgaatctcctcaggagctacttccgcgtcaataatctggacgttaaagtcaagagcataaatgggggattcaccagctttctgaggagaaagtggaagtttaagaaggaacgaaacaaaggatacaagcaccatgctgaggatgctttgatcatcgctaacgcggactttatctttaaggaatggaaaaagctggataaggcaaagaaagtgatggaaaaccagatgttcgaggagaagcaggcagagtcaatgcctgagatcgagacagagcaggaatacaaggaaattttcatcacccctcatcagattaaacacataaaggacttcaaagactataaatactctcatagggtggacaaaaaacccaatcgcaagctcattaatgacaccctgtactcaacacggaaggatgataaaggtaataccttgattgtgaataatcttaatggattgtatgacaaagataacgacaagctcaagaagctgatcaacaagtctccagagaagctccttatgtatcaccacgacccacagacttatcagaaattgaaactgatcatggagcaatacggggatgagaagaacccactctacaaatattatgaggaaacaggtaattacctgaccaagtactccaagaaggataacggaccagtgatcaaaaagataaagtactatggcaacaaacttaatgcgcatttggacataactgacgattaccccaattctcgaaacaaggttgtgaagctctccctgaagccttatagatttgacgtgtacctggataatggggtttataaattcgtcaccgtgaaaaatctggacgtgatcaaaaaggagaactattatgaagtaaactcaaagtgctatgaggaggcgaagaagctgaagaagatctccaatcaggccgagttcatcgcttccttctataagaacgatctcatcaagatcaatggagagctttatcgcgtcattggtgtgaacaatgacttgctgaacaggatcgaagtcaatatgatagacattacctaccgggagtatctcgaaaacatgaatgataaacggccgcctcacatcatcaagacaatcgcatctaaaactcagtcaataaaaaagtactctaccgatatcctggggaatctctatgaagtgaagtcaaagaagcacccacaaatcattaaaaaaggtggatcccccaagaagaagaggaaagtctcgagcgactacaaagaccatgacggtgattataaagatcatgacatcgattacaaggatgacgatgacaagtctggtggttctactaatctgtcagatattattgaaaaggagaccggtaagcaactggttatccaggaatccatcctcatgctcccagaggaggtggaagaagtcattgggaacaagccggaaagcgatatactcgtgcacaccgcctacgacgagagcaccgacgagaatgtcatgcttctgactagcgacgcccctgaatacaagccttgggctctggtcatacaggatagcaacggtgagaacaagattaagatgctctctggtggttctcccaagaagaagaggaaagtc

SEQ ID NO: 332 - protein, 1260 aa, Artificial Sequence
  Synthetic
GSYALGPYQISAPQLPAYNGQTVGTFYYVNDAGGLESKVFSSGGSGGSSGGSSGSETPGTSESATPESSGGSSGGSGKRNYILGLAIGITSVGYGIIDYETRDVIDAGVRLFKEANVENNEGRRSKRGARRLKRRRRHRIQRVKKLLFDYNLLTDHSELSGINPYEARVKGLSQKLSEEEFSAALLHLAKRRGVHNVNEVEEDTGNELSTKEQISRNSKALEEKYVAELQLERLKKDGEVRGSINRFKTSDYVKEAKQLLKVQKAYHQLDQSFIDTYIDLLETRRTYYEGPGEGSPFGWKDIKEWYEMLMGHCTYFPEELRSVKYAYNADLYNALNDLNNLVITRDENEKLEYYEKFQIIENVFKQKKKPTLKQIAKEILVNEEDIKGYRVTSTGKPEFTNLKVYHDIKDITARKEIIENAELLDQIAKILTIYQSSEDIQEELTNLNSELTQEEIEQISNLKGYTGTHNLSLKAINLILDELWHTNDNQIAIFNRLKLVPKKVDLSQQKEIPTTLVDDFILSPVVKRSFIQSIKVINAIIKKYGLPNDIIIELAREKNSKDAQKMINEMQKRNRQTNERIEEIIRTTGKENAKYLIEKIKLHDMQEGKCLYSLEAIPLEDLLNNPFNYEVDHIIPRSVSFDNSFNNKVLVKQEENSKKGNRTPFQYLSSSDSKISYETFKKHILNLAKGKGRISKTKKEYLLEERDINRFSVQKDFINRNLVDTRYATRGLMNLLRSYFRVNNLDVKVKSINGGFTSFLRRKWKFKKERNKGYKHHAEDALIIANADFIFKEWKKLDKAKKVMENQMFEEKQAESMPEIETEQEYKEIFITPHQIKHIKDFKDYKYSHRVDKKPNRKLINDTLYSTRKDDKGNTLIVNNLNGLYDKDNDKLKKLINKSPEKLLMYHHDPQTYQKLKLIMEQYGDEKNPLYKYYEETGNYLTKYSKKDNGPVIKKIKYYGNKLNAHLDITDDYPNSRNKVVKLSLKPYRFDVYLDNGVYKFVTVKNLDVIKKENYYEVNSKCYEEAKKLKKISNQAEFIASFYKNDLIKINGELYRVIGVNNDLLNRIEVNMIDITYREYLENMNDKRPPHIIKTIASKTQSIKKYSTDILGNLYEVKSKKHPQIIKKGGSPKKKRKVSSDYKDHDGDYKDHDIDYKDDDDKSGGSTNLSDIIEKETGKQLVIQESILMLPEEVEEVIGNKPESDILVHTAYDESTDENVMLLTSDAPEYKPWALVIQDSNGENKIKMLSGGSPKKKRKV

SEQ ID NO: 333 - DNA, 3930 bp, Artificial Sequence
  Synthetic
ccaaccccgtacccaaactatgccaatgccggtcatgtggagggtcagagcgccctgttcatgcgtgataacggcatcagcgagggtctggtgttccacaacaacccggaaggcacctgcggtttttgcgtgaacatgaccgagaccctgctgccggaaaacgcgaaaatgaccgtggtgccgccggaaggtgccattccagtgaagcgcggcgctaccggtgaaaccaaagtgtttaccggtaacagcaacagcccgaagagcccgaccaaaggcggttgctctggtggttcttctggtggttctagcggcagcgagactcccgggacctcagagtccgccacacccgaaagtagtggcggcagcagcggcggcagcgggaaacggaactacatcctggggcttgccattgggataaccagcgttggctacggaattattgattatgagacacgcgatgtgattgacgccggggttaggctgttcaaagaggccaacgttgaaaacaacgagggaagacggagtaagcgcggagcaagaagactcaagcgcagacggagacatcggattcagagggtgaaaaagctgctcttcgattacaatctcctgaccgatcatagtgagctgagcggaatcaacccctacgaggcgcgagtgaaagggctttcccagaagctgtccgaagaggagttctccgccgcgttgctgcacctggccaaacggaggggggttcacaatgtaaacgaagtggaggaggacacgggcaatgaacttagtacgaaagaacagatcagtaggaactctaaggctctcgaagagaaatacgtcgctgagttgcagcttgagagactgaaaaaagacggcgaagtacgcggatctattaataggttcaagacttcagattacgtaaaggaagccaagcagctcctgaaagtacagaaagcgtaccatcagctcgatcagagcttcatcgatacctacatagatttgctggagacacggaggacatactacgagggcccaggggaaggatctccttttgggtggaaggacatcaaggaatggtacgagatgcttatgggacattgtacatattttccggaggagctcaggagcgtcaagtacgcctacaatgccgacctgtacaatgccctcaatgacctcaataacctcgtgattaccagggacgagaacgagaagctggagtactatgaaaagttccagattatcgagaatgtgtttaagcagaagaagaagccgacacttaagcagattgcaaaggaaatcctcgtgaatgaggaagatatcaagggatacagagtgacaagtacaggcaagcccgagttcacaaatctgaaggtgtaccacgatattaaggacataaccgcacgaaaggagataatcgaaaacgctgagctcctcgatcagatcgcaaaaattcttaccatctaccagtctagtgaggacattcaggaggaactgactaatctgaacagtgagctcacccaagaggaaattgagcagatttcaaacctgaaaggctacaccgggacgcacaatctgagcctcaaagcaatcaacctcattctggatgaactttggcacacaaatgacaaccaaattgccatattcaaccgcctgaaactggtgccaaaaaaagtggatctgtcacagcaaaaggaaatccctacaaccttggttgacgattttattctgtcccccgttgtcaagcggagcttcatccagtcaatcaaggtgatcaatgccatcattaaaaaatacggattgccaaacgatataattatcgagcttgcacgagagaagaactcaaaggacgcccagaagatgattaacgaaatgcagaagcgcaaccgccagacaaacgaacgcatagaggaaattataagaacaaccggcaaagagaatgccaagtatctgatcgagaaaatcaagctgcacgacatgcaagaaggcaagtgcctgtactctctggaagctatcccactcgaagatctgctgaataatccattcaattacgaggtggaccacatcatccctagatccgtaagctttgacaattccttcaataacaaagttctggttaaacaggaggaaaattctaaaaaagggaaccggaccccgttccagtacctgagctccagtgacagcaagattagctacgagacttttaagaaacatattctgaatctggccaaaggcaaaggcaggatcagcaagaccaagaaggagtacctcctcgaagaacgcgacattaacagatttagtgtgcagaaagatttcatcaaccgaaaccttgtcgatactcggtacgccacgagaggcctgatgaatctcctcaggagctacttccgcgtcaataatctggacgttaaagtcaagagcataaatgggggattcaccagctttctgaggagaaagtggaagtttaagaaggaacgaaacaaaggatacaagcaccatgctgaggatgctttgatcatcgctaacgcggactttatctttaaggaatggaaaaagctggataaggcaaagaaagtgatggaaaaccagatgttcgaggagaagcaggcagagtcaatgcctgagatcgagacagagcaggaatacaaggaaattttcatcacccctcatcagattaaacacataaaggacttcaaagactataaatactctcatagggtggacaaaaaacccaatcgcaagctcattaatgacaccctgtactcaacacggaaggatgataaaggtaataccttgattgtgaataatcttaatggattgtatgacaaagataacgacaagctcaagaagctgatcaacaagtctccagagaagctccttatgtatcaccacgacccacagacttatcagaaattgaaactgatcatggagcaatacggggatgagaagaacccactctacaaatattatgaggaaacaggtaattacctgaccaagtactccaagaaggataacggaccagtgatcaaaaagataaagtactatggcaacaaacttaatgcgcatttggacataactgacgattaccccaattctcgaaacaaggttgtgaagctctccctgaagccttatagatttgacgtgtacctggataatggggtttataaattcgtcaccgtgaaaaatctggacgtgatcaaaaaggagaactattatgaagtaaactcaaagtgctatgaggaggcgaagaagctgaagaagatctccaatcaggccgagttcatcgcttccttctataagaacgatctcatcaagatcaatggagagctttatcgcgtcattggtgtgaacaatgacttgctgaacaggatcgaagtcaatatgatagacattacctaccgggagtatctcgaaaacatgaatgataaacggccgcctcacatcatcaagacaatcgcatctaaaactcagtcaataaaaaagtactctaccgatatcctggggaatctctatgaagtgaagtcaaagaagcacccacaaatcattaaaaaaggtggatcccccaagaagaagaggaaagtctcgagcgactacaaagaccatgacggtgattataaagatcatgacatcgattacaaggatgacgatgacaagtctggtggttctactaatctgtcagatattattgaaaaggagaccggtaagcaactggttatccaggaatccatcctcatgctcccagaggaggtggaagaagtcattgggaacaagccggaaagcgatatactcgtgcacaccgcctacgacgagagcaccgacgagaatgtcatgcttctgactagcgacgcccctgaatacaagccttgggctctggtcatacaggatagcaacggtgagaacaagattaagatgctctctggtggttctcccaagaagaagaggaaagtc

SEQ ID NO: 334 - protein, 1310 aa, Artificial Sequence
  Synthetic
PTPYPNYANAGHVEGQSALFMRDNGISEGLVFHNNPEGTCGFCVNMTETLLPENAKMTVVPPEGAIPVKRGATGETKVFTGNSNSPKSPTKGGCSGGSSGGSSGSETPGTSESATPESSGGSSGGSGKRNYILGLAIGITSVGYGIIDYETRDVIDAGVRLFKEANVENNEGRRSKRGARRLKRRRRHRIQRVKKLLFDYNLLTDHSELSGINPYEARVKGLSQKLSEEEFSAALLHLAKRRGVHNVNEVEEDTGNELSTKEQISRNSKALEEKYVAELQLERLKKDGEVRGSINRFKTSDYVKEAKQLLKVQKAYHQLDQSFIDTYIDLLETRRTYYEGPGEGSPFGWKDIKEWYEMLMGHCTYFPEELRSVKYAYNADLYNALNDLNNLVITRDENEKLEYYEKFQIIENVFKQKKKPTLKQIAKEILVNEEDIKGYRVTSTGKPEFTNLKVYHDIKDITARKEIIENAELLDQIAKILTIYQSSEDIQEELTNLNSELTQEEIEQISNLKGYTGTHNLSLKAINLILDELWHTNDNQIAIFNRLKLVPKKVDLSQQKEIPTTLVDDFILSPVVKRSFIQSIKVINAIIKKYGLPNDIIIELAREKNSKDAQKMINEMQKRNRQTNERIEEIIRTTGKENAKYLIEKIKLHDMQEGKCLYSLEAIPLEDLLNNPFNYEVDHIIPRSVSFDNSFNNKVLVKQEENSKKGNRTPFQYLSSSDSKISYETFKKHILNLAKGKGRISKTKKEYLLEERDINRFSVQKDFINRNLVDTRYATRGLMNLLRSYFRVNNLDVKVKSINGGFTSFLRRKWKFKKERNKGYKHHAEDALIIANADFIFKEWKKLDKAKKVMENQMFEEKQAESMPEIETEQEYKEIFITPHQIKHIKDFKDYKYSHRVDKKPNRKLINDTLYSTRKDDKGNTLIVNNLNGLYDKDNDKLKKLINKSPEKLLMYHHDPQTYQKLKLIMEQYGDEKNPLYKYYEETGNYLTKYSKKDNGPVIKKIKYYGNKLNAHLDITDDYPNSRNKVVKLSLKPYRFDVYLDNGVYKFVTVKNLDVIKKENYYEVNSKCYEEAKKLKKISNQAEFIASFYKNDLIKINGELYRVIGVNNDLLNRIEVNMIDITYREYLENMNDKRPPHIIKTIASKTQSIKKYSTDILGNLYEVKSKKHPQIIKKGGSPKKKRKVSSDYKDHDGDYKDHDIDYKDDDDKSGGSTNLSDIIEKETGKQLVIQESILMLPEEVEEVIGNKPESDILVHTAYDESTDENVMLLTSDAPEYKPWALVIQDSNGENKIKMLSGGSPKKKRKV

SEQ ID NO: 335 - DNA, 5004 bp, Artificial Sequence
  Synthetic
aaacggacagccgacggaagcgagttcgagtcaccaaagaagaagcggaaagtcggcagctacgccctgggtccgtatcagattagcgccccgcagctgccagcttacaatggtcagaccgtgggtaccttctactatgtgaacgacgcgggcggtctggagagcaaggtgtttagcagcggcggttctggaggatctagcggaggatcctctggcagcgagacaccaggaacaagcgagtcagcaacaccagagagcagtggcggcagcagcggcggcagcgacaagaagtacagcatcggcctggccatcggcaccaactctgtgggctgggccgtgatcaccgacgagtacaaggtgcccagcaagaaattcaaggtgctgggcaacaccgaccggcacagcatcaagaagaacctgatcggagccctgctgttcgacagcggcgaaacagccgaggccacccggctgaagagaaccgccagaagaagatacaccagacggaagaaccggatctgctatctgcaagagatcttcagcaacgagatggccaaggtggacgacagcttcttccacagactggaagagtccttcctggtggaagaggataagaagcacgagcggcaccccatcttcggcaacatcgtggacgaggtggcctaccacgagaagtaccccaccatctaccacctgagaaagaaactggtggacagcaccgacaaggccgacctgcggctgatctatctggccctggcccacatgatcaagttccggggccacttcctgatcgagggcgacctgaaccccgacaacagcgacgtggacaagctgttcatccagctggtgcagacctacaaccagctgttcgaggaaaaccccatcaacgccagcggcgtggacgccaaggccatcctgtctgccagactgagcaagagcagacggctggaaaatctgatcgcccagctgcccggcgagaagaagaatggcctgttcggaaacctgattgccctgagcctgggcctgacccccaacttcaagagcaacttcgacctggccgaggatgccaaactgcagctgagcaaggacacctacgacgacgacctggacaacctgctggcccagatcggcgaccagtacgccgacctgtttctggccgccaagaacctgtccgacgccatcctgctgagcgacatcctgagagtgaacaccgagatcaccaaggcccccctgagcgcctctatgatcaagagatacgacgagcaccaccaggacctgaccctgctgaaagctctcgtgcggcagcagctgcctgagaagtacaaagagattttcttcgaccagagcaagaacggctacgccggctacattgacggcggagccagccaggaagagttctacaagttcatcaagcccatcctggaaaagatggacggcaccgaggaactgctcgtgaagctgaacagagaggacctgctgcggaagcagcggaccttcgacaacggcagcatcccccaccagatccacctgggagagctgcacgccattctgcggcggcaggaagatttttacccattcctgaaggacaaccgggaaaagatcgagaagatcctgaccttccgcatcccctactacgtgggccctctggccaggggaaacagcagattcgcctggatgaccagaaagagcgaggaaaccatcaccccctggaacttcgaggaagtggtggacaagggcgcttccgcccagagcttcatcgagcggatgaccaacttcgataagaacctgcccaacgagaaggtgctgcccaagcacagcctgctgtacgagtacttcaccgtgtataacgagctgaccaaagtgaaatacgtgaccgagggaatgagaaagcccgccttcctgagcggcgagcagaaaaaggccatcgtggacctgctgttcaagaccaaccggaaagtgaccgtgaagcagctgaaagaggactacttcaagaaaatcgagtgcttcgactccgtggaaatctccggcgtggaagatcggttcaacgcctccctgggcacataccacgatctgctgaaaattatcaaggacaaggacttcctggacaatgaggaaaacgaggacattctggaagatatcgtgctgaccctgacactgtttgaggacagagagatgatcgaggaacggctgaaaacctatgcccacctgttcgacgacaaagtgatgaagcagctgaagcggcggagatacaccggctggggcaggctgagccggaagctgatcaacggcatccgggacaagcagtccggcaagacaatcctggatttcctgaagtccgacggcttcgccaacagaaacttcatgcagctgatccacgacgacagcctgacctttaaagaggacatccagaaagcccaggtgtccggccagggcgatagcctgcacgagcacattgccaatctggccggcagccccgccattaagaagggcatcctgcagacagtgaaggtggtggacgagctcgtgaaagtgatgggccggcacaagcccgagaacatcgtgatcgaaatggccagagagaaccagaccacccagaagggacagaagaacagccgcgagagaatgaagcggatcgaagagggcatcaaagagctgggcagccagatcctgaaagaacaccccgtggaaaacacccagctgcagaacgagaagctgtacctgtactacctgcagaatgggcgggatatgtacgtggaccaggaactggacatcaaccggctgtccgactacgatgtggacgctatcgtgcctcagagctttctgaaggacgactccatcgacaacaaggtgctgaccagaagcgacaagaaccggggcaagagcgacaacgtgccctccgaagaggtcgtgaagaagatgaagaactactggcggcagctgctgaacgccaagctgattacccagagaaagttcgacaatctgaccaaggccgagagaggcggcctgagcgaactggataaggccggcttcatcaagagacagctggtggaaacccggcagatcacaaagcacgtggcacagatcctggactcccggatgaacactaagtacgacgagaatgacaagctgatccgggaagtgaaagtgatcaccctgaagtccaagctggtgtccgatttccggaaggatttccagttttacaaagtgcgcgagatcaacaactaccaccacgcccacgacgcctacctgaacgccgtcgtgggaaccgccctgatcaaaaagtaccctaagctggaaagcgagttcgtgtacggcgactacaaggtgtacgacgtgcggaagatgatcgccaagagcgagcaggaaatcggcaaggctaccgccaagtacttcttctacagcaacatcatgaactttttcaagaccgagattaccctggccaacggcgagatccggaagcggcctctgatcgagacaaacggcgaaaccggggagatcgtgtgggataagggccgggattttgccaccgtgcggaaagtgctgagcatgccccaagtgaatatcgtgaaaaagaccgaggtgcagacaggcggcttcagcaaagagtctatcctgcccaagaggaacagcgataagctgatcgccagaaagaaggactgggaccctaagaagtacggcggcttcgacagccccaccgtggcctattctgtgctggtggtggccaaagtggaaaagggcaagtccaagaaactgaagagtgtgaaagagctgctggggatcaccatcatggaaagaagcagcttcgagaagaatcccatcgactttctggaagccaagggctacaaagaagtgaaaaaggacctgatcatcaagctgcctaagtactccctgttcgagctggaaaacggccggaagagaatgctggcctctgccggcgaactgcagaagggaaacgaactggccctgccctccaaatatgtgaacttcctgtacctggccagccactatgagaagctgaagggctcccccgaggataatgagcagaaacagctgtttgtggaacagcacaagcactacctggacgagatcatcgagcagatcagcgagttctccaagagagtgatcctggccgacgctaatctggacaaagtgctgtccgcctacaacaagcaccgggataagcccatcagagagcaggccgagaatatcatccacctgtttaccctgaccaatctgggagcccctgccgccttcaagtactttgacaccaccatcgaccggaagaggtacaccagcaccaaagaggtgctggacgccaccctgatccaccagagcatcaccggcctgtacgagacacggatcgacctgtctcagctgggaggtgacagcggcgggagcggcgggagcggggggagcactaatctgagcgacatcattgagaaggagactgggaaacagctggtcattcaggagtccatcctgatgctgcctgaggaggtggaggaagtgatcggcaacaagccagagtctgacatcctggtgcacaccgcctacgacgagtccacagatgagaatgtgatgctgctgacctctgacgcccccgagtataagccttgggccctggtcatccaggattctaacggcgagaataagatcaagatgctgagcggaggatccggaggatctggaggcagcaccaacctgtctgacatcatcgagaaggagacaggcaagcagctggtcatccaggagagcatcctgatgctgcccgaagaagtcgaagaagtgatcggaaacaagcctgagagcgatatcctggtccataccgcctacgacgagagtaccgacgaaaatgtgatgctgctgacatccgacgccccagagtataagccctgggctctggtcatccaggattccaacggagagaacaaaatcaaaatgctgtctggcggctcaaaaagaaccgccgacggcagcgaattcgagcccaagaagaagaggaaagtc

SEQ ID NO: 336 - protein, 1668 aa, Artificial Sequence
  Synthetic
KRTADGSEFESPKKKRKVGSYALGPYQISAPQLPAYNGQTVGTFYYVNDAGGLESKVFSSGGSGGSSGGSSGSETPGTSESATPESSGGSSGGSDKKYSIGLAIGTNSVGWAVITDEYKVPSKKFKVLGNTDRHSIKKNLIGALLFDSGETAEATRLKRTARRRYTRRKNRICYLQEIFSNEMAKVDDSFFHRLEESFLVEEDKKHERHPIFGNIVDEVAYHEKYPTIYHLRKKLVDSTDKADLRLIYLALAHMIKFRGHFLIEGDLNPDNSDVDKLFIQLVQTYNQLFEENPINASGVDAKAILSARLSKSRRLENLIAQLPGEKKNGLFGNLIALSLGLTPNFKSNFDLAEDAKLQLSKDTYDDDLDNLLAQIGDQYADLFLAAKNLSDAILLSDILRVNTEITKAPLSASMIKRYDEHHQDLTLLKALVRQQLPEKYKEIFFDQSKNGYAGYIDGGASQEEFYKFIKPILEKMDGTEELLVKLNREDLLRKQRTFDNGSIPHQIHLGELHAILRRQEDFYPFLKDNREKIEKILTFRIPYYVGPLARGNSRFAWMTRKSEETITPWNFEEVVDKGASAQSFIERMTNFDKNLPNEKVLPKHSLLYEYFTVYNELTKVKYVTEGMRKPAFLSGEQKKAIVDLLFKTNRKVTVKQLKEDYFKKIECFDSVEISGVEDRFNASLGTYHDLLKIIKDKDFLDNEENEDILEDIVLTLTLFEDREMIEERLKTYAHLFDDKVMKQLKRRRYTGWGRLSRKLINGIRDKQSGKTILDFLKSDGFANRNFMQLIHDDSLTFKEDIQKAQVSGQGDSLHEHIANLAGSPAIKKGILQTVKVVDELVKVMGRHKPENIVIEMARENQTTQKGQKNSRERMKRIEEGIKELGSQILKEHPVENTQLQNEKLYLYYLQNGRDMYVDQELDINRLSDYDVDAIVPQSFLKDDSIDNKVLTRSDKNRGKSDNVPSEEVVKKMKNYWRQLLNAKLITQRKFDNLTKAERGGLSELDKAGFIKRQLVETRQITKHVAQILDSRMNTKYDENDKLIREVKVITLKSKLVSDFRKDFQFYKVREINNYHHAHDAYLNAVVGTALIKKYPKLESEFVYGDYKVYDVRKMIAKSEQEIGKATAKYFFYSNIMNFFKTEITLANGEIRKRPLIETNGETGEIVWDKGRDFATVRKVLSMPQVNIVKKTEVQTGGFSKESILPKRNSDKLIARKKDWDPKKYGGFDSPTVAYSVLVVAKVEKGKSKKLKSVKELLGITIMERSSFEKNPIDFLEAKGYKEVKKDLIIKLPKYSLFELENGRKRMLASAGELQKGNELALPSKYVNFLYLASHYEKLKGSPEDNEQKQLFVEQHKHYLDEIIEQISEFSKRVILADANLDKVLSAYNKHRDKPIREQAENIIHLFTLTNLGAPAAFKYFDTTIDRKRYTSTKEVLDATLIHQSITGLYETRIDLSQLGGDSGGSGGSGGSTNLSDIIEKETGKQLVIQESILMLPEEVEEVIGNKPESDILVHTAYDESTDENVMLLTSDAPEYKPWALVIQDSNGENKIKMLSGGSGGSGGSTNLSDIIEKETGKQLVIQESILMLPEEVEEVIGNKPESDILVHTAYDESTDENVMLLTSDAPEYKPWALVIQDSNGENKIKMLSGGSKRTADGSEFEPKKKRKV

SEQ ID NO: 337 - DNA, 5155 bp, Artificial Sequence
  Synthetic
aaacggacagccgacggaagcgagttcgagtcaccaaagaagaagcggaaagtcccaaccccgtacccaaactatgccaatgccggtcatgtggagggtcagagcgccctgttcatgcgtgataacggcatcagcgagggtctggtgttccacaacaacccggaaggcacctgcggtttttgcgtgaacatgaccgagaccctgctgccggaaaacgcgaaaatgaccgtggtgccgccggaaggtgccattccagtgaagcgcggcgctaccggtgaaaccaaagtgtttaccggtaacagcaacagcccgaagagcccgaccaaaggcggttgcttctggaggatctagcggaggatcctctggcagcgagacaccaggaacaagcgagtcagcaacaccagagagcagtggcggcagcagcggcggcagcgacaagaagtacagcatcggcctggccatcggcaccaactctgtgggctgggccgtgatcaccgacgagtacaaggtgcccagcaagaaattcaaggtgctgggcaacaccgaccggcacagcatcaagaagaacctgatcggagccctgctgttcgacagcggcgaaacagccgaggccacccggctgaagagaaccgccagaagaagatacaccagacggaagaaccggatctgctatctgcaagagatcttcagcaacgagatggccaaggtggacgacagcttcttccacagactggaagagtccttcctggtggaagaggataagaagcacgagcggcaccccatcttcggcaacatcgtggacgaggtggcctaccacgagaagtaccccaccatctaccacctgagaaagaaactggtggacagcaccgacaaggccgacctgcggctgatctatctggccctggcccacatgatcaagttccggggccacttcctgatcgagggcgacctgaaccccgacaacagcgacgtggacaagctgttcatccagctggtgcagacctacaaccagctgttcgaggaaaaccccatcaacgccagcggcgtggacgccaaggccatcctgtctgccagactgagcaagagcagacggctggaaaatctgatcgcccagctgcccggcgagaagaagaatggcctgttcggaaacctgattgccctgagcctgggcctgacccccaacttcaagagcaacttcgacctggccgaggatgccaaactgcagctgagcaaggacacctacgacgacgacctggacaacctgctggcccagatcggcgaccagtacgccgacctgtttctggccgccaagaacctgtccgacgccatcctgctgagcgacatcctgagagtgaacaccgagatcaccaaggcccccctgagcgcctctatgatcaagagatacgacgagcaccaccaggacctgaccctgctgaaagctctcgtgcggcagcagctgcctgagaagtacaaagagattttcttcgaccagagcaagaacggctacgccggctacattgacggcggagccagccaggaagagttctacaagttcatcaagcccatcctggaaaagatggacggcaccgaggaactgctcgtgaagctgaacagagaggacctgctgcggaagcagcggaccttcgacaacggcagcatcccccaccagatccacctgggagagctgcacgccattctgcggcggcaggaagatttttacccattcctgaaggacaaccgggaaaagatcgagaagatcctgaccttccgcatcccctactacgtgggccctctggccaggggaaacagcagattcgcctggatgaccagaaagagcgaggaaaccatcaccccctggaacttcgaggaagtggtggacaagggcgcttccgcccagagcttcatcgagcggatgaccaacttcgataagaacctgcccaacgagaaggtgctgcccaagcacagcctgctgtacgagtacttcaccgtgtataacgagctgaccaaagtgaaatacgtgaccgagggaatgagaaagcccgccttcctgagcggcgagcagaaaaaggccatcgtggacctgctgttcaagaccaaccggaaagtgaccgtgaagcagctgaaagaggactacttcaagaaaatcgagtgcttcgactccgtggaaatctccggcgtggaagatcggttcaacgcctccctgggcacataccacgatctgctgaaaattatcaaggacaaggacttcctggacaatgaggaaaacgaggacattctggaagatatcgtgctgaccctgacactgtttgaggacagagagatgatcgaggaacggctgaaaacctatgcccacctgttcgacgacaaagtgatgaagcagctgaagcggcggagatacaccggctggggcaggctgagccggaagctgatcaacggcatccgggacaagcagtccggcaagacaatcctggatttcctgaagtccgacggcttcgccaacagaaacttcatgcagctgatccacgacgacagcctgacctttaaagaggacatccagaaagcccaggtgtccggccagggcgatagcctgcacgagcacattgccaatctggccggcagccccgccattaagaagggcatcctgcagacagtgaaggtggtggacgagctcgtgaaagtgatgggccggcacaagcccgagaacatcgtgatcgaaatggccagagagaaccagaccacccagaagggacagaagaacagccgcgagagaatgaagcggatcgaagagggcatcaaagagctgggcagccagatcctgaaagaacaccccgtggaaaacacccagctgcagaacgagaagctgtacctgtactacctgcagaatgggcgggatatgtacgtggaccaggaactggacatcaaccggctgtccgactacgatgtggacgctatcgtgcctcagagctttctgaaggacgactccatcgacaacaaggtgctgaccagaagcgacaagaaccggggcaagagcgacaacgtgccctccgaagaggtcgtgaagaagatgaagaactactggcggcagctgctgaacgccaagctgattacccagagaaagttcgacaatctgaccaaggccgagagaggcggcctgagcgaactggataaggccggcttcatcaagagacagctggtggaaacccggcagatcacaaagcacgtggcacagatcctggactcccggatgaacactaagtacgacgagaatgacaagctgatccgggaagtgaaagtgatcaccctgaagtccaagctggtgtccgatttccggaaggatttccagttttacaaagtgcgcgagatcaacaactaccaccacgcccacgacgcctacctgaacgccgtcgtgggaaccgccctgatcaaaaagtaccctaagctggaaagcgagttcgtgtacggcgactacaaggtgtacgacgtgcggaagatgatcgccaagagcgagcaggaaatcggcaaggctaccgccaagtacttcttctacagcaacatcatgaactttttcaagaccgagattaccctggccaacggcgagatccggaagcggcctctgatcgagacaaacggcgaaaccggggagatcgtgtgggataagggccgggattttgccaccgtgcggaaagtgctgagcatgccccaagtgaatatcgtgaaaaagaccgaggtgcagacaggcggcttcagcaaagagtctatcctgcccaagaggaacagcgataagctgatcgccagaaagaaggactgggaccctaagaagtacggcggcttcgacagccccaccgtggcctattctgtgctggtggtggccaaagtggaaaagggcaagtccaagaaactgaagagtgtgaaagagctgctggggatcaccatcatggaaagaagcagcttcgagaagaatcccatcgactttctggaagccaagggctacaaagaagtgaaaaaggacctgatcatcaagctgcctaagtactccctgttcgagctggaaaacggccggaagagaatgctggcctctgccggcgaactgcagaagggaaacgaactggccctgccctccaaatatgtgaacttcctgtacctggccagccactatgagaagctgaagggctcccccgaggataatgagcagaaacagctgtttgtggaacagcacaagcactacctggacgagatcatcgagcagatcagcgagttctccaagagagtgatcctggccgacgctaatctggacaaagtgctgtccgcctacaacaagcaccgggataagcccatcagagagcaggccgagaatatcatccacctgtttaccctgaccaatctgggagcccctgccgccttcaagtactttgacaccaccatcgaccggaagaggtacaccagcaccaaagaggtgctggacgccaccctgatccaccagagcatcaccggcctgtacgagacacggatcgacctgtctcagctgggaggtgacagcggcgggagcggcgggagcggggggagcactaatctgagcgacatcattgagaaggagactgggaaacagctggtcattcaggagtccatcctgatgctgcctgaggaggtggaggaagtgatcggcaacaagccagagtctgacatcctggtgcacaccgcctacgacgagtccacagatgagaatgtgatgctgctgacctctgacgcccccgagtataagccttgggccctggtcatccaggattctaacggcgagaataagatcaagatgctgagcggaggatccggaggatctggaggcagcaccaacctgtctgacatcatcgagaaggagacaggcaagcagctggtcatccaggagagcatcctgatgctgcccgaagaagtcgaagaagtgatcggaaacaagcctgagagcgatatcctggtccataccgcctacgacgagagtaccgacgaaaatgtgatgctgctgacatccgacgccccagagtataagccctgggctctggtcatccaggattccaacggagagaacaaaatcaaaatgctgtctggcggctcaaaaagaaccgccgacggcagcgaattcgagcccaagaagaagaggaaagtc

SEQ ID NO: 338 - protein, 44 aa, Artificial Sequence
  Synthetic
GSYALGPYQISAPQLPAYNGQTVGTFYYVNDAGGLESKVFSSGG

SEQ ID NO: 339 - protein, 94 aa, Artificial Sequence
  Synthetic
PTPYPNYANAGHVEGQSALFMRDNGISEGLVFHNNPEGTCGFCVNMTETLLPENAKMTVVPPEGAIPVKRGATGETKVFTGNSNSPKSPTKGGC

SEQ ID NO: 340 - protein, 108 aa, Artificial Sequence
  Synthetic
GSYALGPYQISAPQLPAYNGQTVGTFYYVNDAGGLESKVFSSGGPTPYPNYANAGHVEGQSALFMRDNGISEGLVFHNNPEGTCGFCVNMTETLLPENAKMTVVPPEG

SEQ ID NO: 341 - protein, 30 aa, Artificial Sequence
  Synthetic
AIPVKRGATGETKVFTGNSNSPKSPTKGGC

SEQ ID NO: 342 - DNA, 2733 bp, Artificial Sequence
  Synthetic
cccaagaagaagaggaaggtgggcattcaccgcggggtacctatggtggacttgaggacactcggttattcgcaacagcaacaggagaaaatcaagcctaaggtcaggagcaccgtcgcgcaacaccacgaggcgcttgtggggcatggcttcactcatgcgcatattgtcgcgctttcacagcaccctgcggcgcttgggacggtggctgtcaaataccaagatatgattgcggccctgcccgaagccacgcacgaggcaattgtaggggtcggtaaacagtggtcgggagcgcgagcacttgaggcgctgctgactgtggcgggtgagcttagggggcctccgctccagctcgacaccgggcagctgctgaagatcgcgaagagagggggagtaacagcggtagaggcagtgcacgcctggcgcaatgcgctcaccggggcccccttgaacctgaccccagaccaggtagtcgcaatcgcgtcaaacggagggggaaagcaagccctggaaaccgtgcaaaggttgttgccggtcctttgtcaagaccacggccttacaccggagcaagtcgtggccattgcatcccacgacggtggcaaacaggctcttgagacggttcagagacttctcccagttctctgtcaagcccacgggctgactcccgatcaagttgtagcgattgcgtcgaacattggagggaaacaagcattggagactgtccaacggctccttcccgtgttgtgtcaagcccacggtttgacgcctgcacaagtggtcgccatcgcctcgaatggcggcggtaagcaggcgctggaaacagtacagcgcctgctgcctgtactgtgccaggatcatggactgaccccagaccaggtagtcgcaatcgcgtcaaacggagggggaaagcaagccctggaaaccgtgcaaaggttgttgccggtcctttgtcaagaccacggccttacaccggagcaagtcgtggccattgcaagcaacatcggtggcaaacaggctcttgagacggttcagagacttctcccagttctctgtcaagcccacgggctgactcccgatcaagttgtagcgattgcgtcgcatgacggagggaaacaagcattggagactgtccaacggctccttcccgtgttgtgtcaagcccacggtttgacgcctgcacaagtggtcgccatcgcctccaatattggcggtaagcaggcgctggaaacagtacagcgcctgctgcctgtactgtgccaggatcatggactgaccccagaccaggtagtcgcaatcgcgtcacatgacgggggaaagcaagccctggaaaccgtgcaaaggttgttgccggtcctttgtcaagaccacggccttacaccggagcaagtcgtggccattgcatcccacgacggtggcaaacaggctcttgagacggttcagagacttctcccagttctctgtcaagcccacgggctgactcccgatcaagttgtagcgattgcgtccaacggtggagggaaacaagcattggagactgtccaacggctccttcccgtgttgtgtcaagcccacggtttgacgcctgcacaagtggtcgccatcgccaacaacaacggcggtaagcaggcgctggaaacagtacagcgcctgctgcctgtactgtgccaggatcatggactgaccccagaccaggtagtcgcaatcgcgtcacatgacgggggaaagcaagccctggaaaccgtgcaaaggttgttgccggtcctttgtcaagaccacggccttacaccggagcaagtcgtggccattgcaagcaacatcggtggcaaacaggctcttgagacggttcagagacttctcccagttctctgtcaagcccacgggctgactcccgatcaagttgtagcgattgcgaataacaatggagggaaacaagcattggagactgtccaacggctccttcccgtgttgtgtcaagcccacggtttgacgcctgcacaagtggtcgccatcgccagccatgatggcggtaagcaggcgctggaaacagtacagcgcctgctgcctgtactgtgccaggatcatggactgacacccgaacaggtggtcgccattgcttctaatgggggaggacggccagccttggagtccatcgtagcccaattgtccaggcccgatcccgcgttggctgcgttaacgaatgaccatctggtggcgttggcatgtcttggtggacgacccgcgctcgatgcagtcaaaaagggtctgcctcatgctcccgcattgatcaaaagaaccaaccggcggattcccgagagaacttcccatcgagtcgcgggatccggcagctacgccctgggtccgtatcagattagcgccccgcagctgccagcttacaatggtcagaccgtgggtaccttctactatgtgaacgacgcgggcggtctggagagcaaggtgtttagcagcggcggttctggcggctcaactaatctgagcgacatcattgagaaggagactgggaaacagctggtcattcaggagtccatcctgatgctgcctgaggaggtggaggaagtgatcggcaacaagccagagtctgacatcctggtgcacaccgcctacgacgagtccacagatgagaatgtgatgctgctgacctctgacgcccccgagtataagccttgggccctggtcatccaggattctaacggcgagaataagatcaagatgctg

SEQ ID NO: 343 - protein, 911 aa, Artificial Sequence
  Synthetic
PKKKRKVGIHRGVPMVDLRTLGYSQQQQEKIKPKVRSTVAQHHEALVGHGFTHAHIVALSQHPAALGTVAVKYQDMIAALPEATHEAIVGVGKQWSGARALEALLTVAGELRGPPLQLDTGQLLKIAKRGGVTAVEAVHAWRNALTGAPLNLTPDQVVAIASNGGGKQALETVQRLLPVLCQDHGLTPEQVVAIASHDGGKQALETVQRLLPVLCQAHGLTPDQVVAIASNIGGKQALETVQRLLPVLCQAHGLTPAQVVAIASNGGGKQALETVQRLLPVLCQDHGLTPDQVVAIASNGGGKQALETVQRLLPVLCQDHGLTPEQVVAIASNIGGKQALETVQRLLPVLCQAHGLTPDQVVAIASHDGGKQALETVQRLLPVLCQAHGLTPAQVVAIASNIGGKQALETVQRLLPVLCQDHGLTPDQVVAIASHDGGKQALETVQRLLPVLCQDHGLTPEQVVAIASHDGGKQALETVQRLLPVLCQAHGLTPDQVVAIASNGGGKQALETVQRLLPVLCQAHGLTPAQVVAIANNNGGKQALETVQRLLPVLCQDHGLTPDQVVAIASHDGGKQALETVQRLLPVLCQDHGLTPEQVVAIASNIGGKQALETVQRLLPVLCQAHGLTPDQVVAIANNNGGKQALETVQRLLPVLCQAHGLTPAQVVAIASHDGGKQALETVQRLLPVLCQDHGLTPEQVVAIASNGGGRPALESIVAQLSRPDPALAALTNDHLVALACLGGRPALDAVKKGLPHAPALIKRTNRRIPERTSHRVAGSGSYALGPYQISAPQLPAYNGQTVGTFYYVNDAGGLESKVFSSGGSGGSTNLSDIIEKETGKQLVIQESILMLPEEVEEVIGNKPESDILVHTAYDESTDENVMLLTSDAPEYKPWALVIQDSNGENKIKML

SEQ ID NO: 344 - DNA, 2883 bp, Artificial Sequence
  Synthetic
cccaagaagaagaggaaggtgggcattcaccgcggggtacctatggtggacttgaggacactcggttattcgcaacagcaacaggagaaaatcaagcctaaggtcaggagcaccgtcgcgcaacaccacgaggcgcttgtggggcatggcttcactcatgcgcatattgtcgcgctttcacagcaccctgcggcgcttgggacggtggctgtcaaataccaagatatgattgcggccctgcccgaagccacgcacgaggcaattgtaggggtcggtaaacagtggtcgggagcgcgagcacttgaggcgctgctgactgtggcgggtgagcttagggggcctccgctccagctcgacaccgggcagctgctgaagatcgcgaagagagggggagtaacagcggtagaggcagtgcacgcctggcgcaatgcgctcaccggggcccccttgaacctgaccccagaccaggtagtcgcaatcgcgtcacatgacgggggaaagcaagccctggaaaccgtgcaaaggttgttgccggtcctttgtcaagaccacggccttacaccggagcaagtcgtggccattgcaagcaatgggggtggcaaacaggctcttgagacggttcagagacttctcccagttctctgtcaagcccacgggctgactcccgatcaagttgtagcgattgcgtccaacggtggagggaaacaagcattggagactgtccaacggctccttcccgtgttgtgtcaagcccacggtttgacgcctgcacaagtggtcgccatcgccagccatgatggcggtaagcaggcgctggaaacagtacagcgcctgctgcctgtactgtgccaggatcatggactgaccccagaccaggtagtcgcaatcgcgtcacatgacgggggaaagcaagccctggaaaccgtgcaaaggttgttgccggtcctttgtcaagaccacggccttacaccggagcaagtcgtggccattgcaagcaacatcggtggcaaacaggctcttgagacggttcagagacttctcccagttctctgtcaagcccacgggctgactcccgatcaagttgtagcgattgcgaataacaatggagggaaacaagcattggagactgtccaacggctccttcccgtgttgtgtcaagcccacggtttgacgcctgcacaagtggtcgccatcgcctccaatattggcggtaagcaggcgctggaaacagtacagcgcctgctgcctgtactgtgccaggatcatggactgaccccagaccaggtagtcgcaatcgcgtcgaacattgggggaaagcaagccctggaaaccgtgcaaaggttgttgccggtcctttgtcaagaccacggccttacaccggagcaagtcgtggccattgcaagcaatgggggtggcaaacaggctcttgagacggttcagagacttctcccagttctctgtcaagcccacgggctgactcccgatcaagttgtagcgattgcgtccaacggtggagggaaacaagcattggagactgtccaacggctccttcccgtgttgtgtcaagcccacggtttgacgcctgcacaagtggtcgccatcgccaacaacaacggcggtaagcaggcgctggaaacagtacagcgcctgctgcctgtactgtgccaggatcatggactgaccccagaccaggtagtcgcaatcgcgtcgaacattgggggaaagcaagccctggaaaccgtgcaaaggttgttgccggtcctttgtcaagaccacggccttacaccggagcaagtcgtggccattgcaagcaatgggggtggcaaacaggctcttgagacggttcagagacttctcccagttctctgtcaagcccacgggctgactcccgatcaagttgtagcgattgcgtcgaacattggagggaaacaagcattggagactgtccaacggctccttcccgtgttgtgtcaagcccacggtttgacgcctgcacaagtggtcgccatcgccagccatgatggcggtaagcaggcgctggaaacagtacagcgcctgctgcctgtactgtgccaggatcatggactgacacccgaacaggtggtcgccattgcttctaatgggggaggacggccagccttggagtccatcgtagcccaattgtccaggcccgatcccgcgttggctgcgttaacgaatgaccatctggtggcgttggcatgtcttggtggacgacccgcgctcgatgcagtcaaaaagggtctgcctcatgctcccgcattgatcaaaagaaccaaccggcggattcccgagagaacttcccatcgagtcgcgggatccccaaccccgtacccaaactatgccaatgccggtcatgtggagggtcagagcgccctgttcatgcgtgataacggcatcagcgagggtctggtgttccacaacaacccggaaggcacctgcggtttttgcgtgaacatgaccgagaccctgctgccggaaaacgcgaaaatgaccgtggtgccgccggaaggtgccattccagtgaagcgcggcgctaccggtgaaaccaaagtgtttaccggtaacagcaacagcccgaagagcccgaccaaaggcggttgctctggcggctcaactaatctgagcgacatcattgagaaggagactgggaaacagctggtcattcaggagtccatcctgatgctgcctgaggaggtggaggaagtgatcggcaacaagccagagtctgacatcctggtgcacaccgcctacgacgagtccacagatgagaatgtgatgctgctgacctctgacgcccccgagtataagccttgggccctggtcatccaggattctaacggcgagaataagatcaagatgctg

SEQ ID NO: 345 - protein, 961 aa, Artificial Sequence
  Synthetic
PKKKRKVGIHRGVPMVDLRTLGYSQQQQEKIKPKVRSTVAQHHEALVGHGFTHAHIVALSQHPAALGTVAVKYQDMIAALPEATHEAIVGVGKQWSGARALEALLTVAGELRGPPLQLDTGQLLKIAKRGGVTAVEAVHAWRNALTGAPLNLTPDQVVAIASHDGGKQALETVQRLLPVLCQDHGLTPEQVVAIASNGGGKQALETVQRLLPVLCQAHGLTPDQVVAIASNGGGKQALETVQRLLPVLCQAHGLTPAQVVAIASHDGGKQALETVQRLLPVLCQDHGLTPDQVVAIASHDGGKQALETVQRLLPVLCQDHGLTPEQVVAIASNIGGKQALETVQRLLPVLCQAHGLTPDQVVAIANNNGGKQALETVQRLLPVLCQAHGLTPAQVVAIASNIGGKQALETVQRLLPVLCQDHGLTPDQVVAIASNIGGKQALETVQRLLPVLCQDHGLTPEQVVAIASNGGGKQALETVQRLLPVLCQAHGLTPDQVVAIASNGGGKQALETVQRLLPVLCQAHGLTPAQVVAIANNNGGKQALETVQRLLPVLCQDHGLTPDQVVAIASNIGGKQALETVQRLLPVLCQDHGLTPEQVVAIASNGGGKQALETVQRLLPVLCQAHGLTPDQVVAIASNIGGKQALETVQRLLPVLCQAHGLTPAQVVAIASHDGGKQALETVQRLLPVLCQDHGLTPEQVVAIASNGGGRPALESIVAQLSRPDPALAALTNDHLVALACLGGRPALDAVKKGLPHAPALIKRTNRRIPERTSHRVAGSPTPYPNYANAGHVEGQSALFMRDNGISEGLVFHNNPEGTCGFCVNMTETLLPENAKMTVVPPEGAIPVKRGATGETKVFTGNSNSPKSPTKGGCSGGSTNLSDIIEKETGKQLVIQESILMLPEEVEEVIGNKPESDILVHTAYDESTDENVMLLTSDAPEYKPWALVIQDSNGENKIKML

SEQ ID NO: 346 - protein, 883 aa, Artificial Sequence
  Synthetic
MNTINIAKNDFSDIELAAIPFNTLADHYGERLAREQLALEHESYEMGEARFRKMFERQLKAGEVADNAAAKPLITTLLPKMIARINDWFEEVKAKRGKRPTAFQFLQEIKPEAVAYITIKTTLACLTSADNTTVQAVASAIGRAIEDEARFGRIRDLKAKHFKKNVEEQLNKRVGHVYKKAFMQVVEADMLSKGLLGGEAWSSWHKEDSIHVGVRCIEMLIESTGMVSLHRQNAGVVGQDSETIELAPEYAEAIATRAGALAGISPMFQPCVVPPKPWTGITGGGYWANGRRPLALVRTHSKKALMRYEDVYMPEVYKAINIAQNTAWKINKKVLAVANVITKWKHCPVEDIPAIEREELPMKPEDIDMNPEALTAWKRAAAAVYRKDKARKSRRISLEFMLEQANKFANHKAIWFPYNMDWRGRVYAVSMFNPQGNDMTKGLLTLAKGKPIGKEGYYWLKIHGANCAGVDKVPFPERIKFIEENHENIMACAKSPLENTWWAEQDSPFCFLAFCFEYAGVQHHGLSYNCSLPLAFDGSCSGIQHFSAMLRDEVGGRAVNLLPSETVQDIYGIVAKKVNEILQADAINGTDNEVVTVTDENTGEISEKVKLGTKALAGQWLAYGVTRSVTKRSVMTLAYGSKEFGFRQQVLEDTIQPAIDSGKGLMFTQPNQAAGYMAKLIWESVSVTVVAAVEAMNWLKSAAKLLAAEVKDKKTGEILRKRCAVHWVTPDGFPVWQEYKKPIQTRLNLMFLGQFRLQPTINTNKDSEIDAHKQESGIAPNFVHSQDGSHLRKTVVWAHEKYGIESFALIHDSFGTIPADAANLFKAVRETMVDTYESCDVLADFYDQFADQLHESQLDKMPALPAKGNLNLRDILESDFAFA

SEQ ID NO: 347 - protein, 8 aa, Artificial Sequence
  Synthetic
DYKDDDDK

SEQ ID NO: 348 - protein, 13 aa, Artificial Sequence
  Synthetic
AANDENYNYALAA

SEQ ID NO: 349 - protein, 239 aa, Artificial Sequence
  Synthetic
MVSKGEELFTGVVPILVELDGDVNGHKFSVSGEGEGDATYGKLTLKFICTTGKLPVPWPTLVTTLTYGVQCFSRYPDHMKQHDFFKSAMPEGYVQERTIFFKDDGNYKTRAEVKFEGDTLVNRIELKGIDFKEDGNILGHKLEYNYNSHNVYIMADKQKNGIKVNFKIRHNIEDGSVQLADHYQQNTPIGDGPVLLPDNHYLSTQSALSKDPNEKRDHMVLLEFVTAAGITLGMDELYK

SEQ ID NO: 350 - protein, 236 aa, Artificial Sequence
  Synthetic
MVSKGEEDNMAIIKEFMRFKVHMEGSVNGHEFEIEGEGEGRPYEGTQTAKLKVTKGGPLPFAWDILSPQFMYGSKAYVKHPADIPDYLKLSFPEGFKWERVMNFEDGGVVTVTQDSSLQDGEFIYKVKLRGTNFPSDGPVMQKKTMGWEASSERMYPEDGALKGEIKQRLKLKDGGHYDAEVKTTYKAKKPVQLPGAYNVNIKLDITSHNEDYTIVEQYERAEGRHSTGGMDELYK

SEQ ID NO: 351 - DNA, 14 bp, Artificial Sequence
  Synthetic
tccgacttcgcgtt

SEQ ID NO: 352 - DNA, 16 bp, Artificial Sequence
  Synthetic
tctagcctagccgttt

SEQ ID NO: 353 - DNA, 11 bp, Artificial Sequence
  Synthetic
tcctaatgctt

SEQ ID NO: 354 - DNA, 19 bp, Artificial Sequence
  Synthetic
tcttagcatactcctcaat

SEQ ID NO: 355 - DNA, 18 bp, Artificial Sequence
  Synthetic
tgctagtaaccacgttct

SEQ ID NO: 356 - DNA, 12 bp, Artificial Sequence
  Synthetic
tgaagcttcacc

SEQ ID NO: 357 - DNA, 13 bp, Artificial Sequence
  Synthetic
tcttcaatcagcc

SEQ ID NO: 358 - DNA, 16 bp, Artificial Sequence
  Synthetic
tcaaaaccatacctct

SEQ ID NO: 359 - DNA, 15 bp, Artificial Sequence
  Synthetic
tcataatagttacaa

SEQ ID NO: 360 - DNA, 17 bp, Artificial Sequence
  Synthetic
tattaaacacaaactat

SEQ ID NO: 361 - DNA, 17 bp, Artificial Sequence
  Synthetic
tattaaacacaaactac

SEQ ID NO: 362 - DNA, 18 bp, Artificial Sequence
  Synthetic
ttacgcggcggggctgtc

SEQ ID NO: 363 - DNA, 18 bp, Artificial Sequence
  Synthetic
tctgaaaaagactctgca

SEQ ID NO: 364 - DNA, 12 bp, Artificial Sequence
  Synthetic
tcgtcgtttgct

SEQ ID NO: 365 - DNA, 19 bp, Artificial Sequence
  Synthetic
tgagtttgatgctcaccct

SEQ ID NO: 366 - DNA, 13 bp, Artificial Sequence
  Synthetic
tatatagcctaga

SEQ ID NO: 367 - DNA, 16 bp, Artificial Sequence
  Synthetic
tagaactgctattatt

SEQ ID NO: 368 - DNA, 18 bp, Artificial Sequence
  Synthetic
tcctgtaagtaggagagt

SEQ ID NO: 369 - DNA, 13 bp, Artificial Sequence
  Synthetic
tgggcgattatga

SEQ ID NO: 370 - DNA, 11 bp, Artificial Sequence
  Synthetic
tggctgttact

SEQ ID NO: 371 - DNA, 17 bp, Artificial Sequence
  Synthetic
tgctaggctgccaatgt

SEQ ID NO: 372 - DNA, 17 bp, Artificial Sequence
  Synthetic
tgctaggctgccaatgg

SEQ ID NO: 373 - DNA, 10 bp, Artificial Sequence
  Synthetic
tgctaggtgt

SEQ ID NO: 374 - DNA, 13 bp, Artificial Sequence
  Synthetic
tatgggctttggt

SEQ ID NO: 375 - DNA, 18 bp, Artificial Sequence
  Synthetic
tccgggaggccgcacttg

SEQ ID NO: 376 - DNA, 18 bp, Artificial Sequence
  Synthetic
tccatttctgtcatcgta

SEQ ID NO: 377 - protein, 84 aa, Artificial Sequence
  Synthetic
MTNLSDIIEKETGKQLVIQESILMLPEEVEEVIGNKPESDILVHTAYDESTDENVMLLTSDAPEYKPWALVIQDSNGENKIKML

SEQ ID NO: 378 - protein, 83 aa, Artificial Sequence
  Synthetic
TNLSDIIEKETGKQLVIQESILMLPEEVEEVIGNKPESDILVHTAYDESTDENVMLLTSDAPEYKPWALVIQDSNGENKIKML

SEQ ID NO: 379 - protein, 112 aa, Artificial Sequence
  Synthetic
MTLELQLKHYITNLFNLPKDEKWHCESIEEIADDILPDQYVRLGALSNKILQTYTYYSDTLHESNIYPFILYYQKQLIAIGYIDENHDMDFLYLHNTIMPLLDQRYLLTGGQ

SEQ ID NO: 380 - protein, 130 aa, Artificial Sequence
  Synthetic
MNKNFDEVKADLRTVTGKKIEFKERLKNILRVQMNQLGFEDSYMIQVQVSSDQEEWVECHENMSLSDFEVMYGNISGEIKRMTVVKYEEANIEKLVELKFEYEYAKAHQEYIRAYTKLMSNTLYGRKPSL

SEQ ID NO: 381 - protein, 124 aa, Artificial Sequence
  Synthetic
MNEEKMHYRDAIKEVELTMMSLDSHFRTHKEFTDSYLLVLILEDVVGETRVEVSEGLTFDEASYIIGGTSDNILNMHMINYCEKNREEIYKWLKVSRVNTFKSNYAKMLLNTAYGKDLLKGVVK

SEQ ID NO: 382 - protein, 91 aa, Artificial Sequence
  Synthetic
MNNHFMSIGRNCSKCNNVRLNEDFSKSEEICNECFDKEERFVDSYTLIYITEDETGKRFEAILENQTIEETEIIYGNIIDKIIVWNVILTM

SEQ ID NO: 383 - protein, 124 aa, Artificial Sequence
  Synthetic
DGNEHWEVHPGLSLSDFEVVYGNNPHQIVKLRLDKEVGGSGGSMVQNDFIDSYTLCWLLRDDSGGGGSMVQNDFIDSYTLCWLLRDDDGNEHWEVHPGLSLSDFEVVYGNNPHQIVKLRLDKEV

SEQ ID NO: 384 - DNA, 15 bp, Artificial Sequence
  Synthetic
tttgtagtctagtct

SEQ ID NO: 385 - DNA, 15 bp, Artificial Sequence
  Synthetic
cattatgatcgtacg

SEQ ID NO: 386 - DNA, 15 bp, Artificial Sequence
  Synthetic
ctattcagggattga

SEQ ID NO: 387 - DNA, 15 bp, Artificial Sequence
  Synthetic
ctgataccggaagac

SEQ ID NO: 388 - DNA, 15 bp, Artificial Sequence
  Synthetic
atctcagttgaagtg

SEQ ID NO: 389 - DNA, 15 bp, Artificial Sequence
  Synthetic
gtgtatacgacagag

SEQ ID NO: 390 - DNA, 15 bp, Artificial Sequence
  Synthetic
accgtgcacctacca

SEQ ID NO: 391 - DNA, 15 bp, Artificial Sequence
  Synthetic
aacctccttagtcta

SEQ ID NO: 392 - DNA, 15 bp, Artificial Sequence
  Synthetic
agttcagaccaattg

SEQ ID NO: 393 - DNA, 15 bp, Artificial Sequence
  Synthetic
gtagtttgtccagaa

SEQ ID NO: 394 - DNA, 15 bp, Artificial Sequence
  Synthetic
ctcagattttatcac

SEQ ID NO: 395 - DNA, 15 bp, Artificial Sequence
  Synthetic
cagaggacgcacgct

SEQ ID NO: 396 - DNA, 15 bp, Artificial Sequence
  Synthetic
ctacctttatgatcc

SEQ ID NO: 397 - DNA, 15 bp, Artificial Sequence
  Synthetic
tccttggtcctcgag

SEQ ID NO: 398 - DNA, 15 bp, Artificial Sequence
  Synthetic
aagaggagacgtcag

SEQ ID NO: 399 - DNA, 15 bp, Artificial Sequence
  Synthetic
tccagatatctttaa

SEQ ID NO: 400 - protein, 143 aa, Artificial Sequence
  Synthetic
MAERPFQCRICMRNFSTSGSLSRHIRTHTGEKPFACDICGRKFAQSGSLTRHTKIHTGGQRPFQCRICMRNFSRSDALSQHIRTHTGEKPFACDICGRKFARNDNRITHTKIHTGEKPFQCRICMRKFARSDHLTQHTKIHLR

SEQ ID NO: 401 - protein, 143 aa, Artificial Sequence
  Synthetic
MAERPFQCRICMRNFSQASNLISHIRTHTGEKPFACDICGRKFATSHSLTEHTKIHTGSQKPFQCRICMRNFSERSHLREHIRTHTGEKPFACDICGRKFAQSGNLTEHTKIHTGEKPFQCRICMRKFASKKALTEHTKIHLR

SEQ ID NO: 402 - protein, 143 aa, Artificial Sequence
  Synthetic
MAERPFQCRICMRNFSQASNLISHIRTHTGEKPFACDICGRKFAQRANLRAHTKIHTGSQKPFQCRICMRNFSQASNLISHIRTHTGEKPFACDICGRKFATSHSLTEHTKIHTGEKPFQCRICMRKFAERSHLREHTKIHLR

SEQ ID NO: 403 - protein, 143 aa, Artificial Sequence
  Synthetic
MAERPFQCRICMRNFSRSDNLSTHIRTHTGEKPFACDICGRKFADRSDLSRHTKIHTGEKPFQCRICMRKFAQSGDLTRHTKIHTGSQKPFQCRICMRNFSRSDSLSAHIRTHTGEKPFACDICGRKFAQKATRITHTKIHLR

SEQ ID NO: 404 - protein, 143 aa, Artificial Sequence
  Synthetic
MAERPFQCRICMRNFSQSSSLVRHIRTHTGEKPFACDICGRKFARSDNLVRHTKIHTGSQKPFQCRICMRNFSQAGHLASHIRTHTGEKPFACDICGRKFARKDNLKNHTKIHTGEKPFQCRICMRKFARKDALRGHTKIHLR

SEQ ID NO: 405 - protein, 143 aa, Artificial Sequence
  Synthetic
MAERPFQCRICMRNFSRSDHLTTHIRTHTGEKPFACDICGRKFAQSSSLVRHTKIHTGSQKPFQCRICMRNFSRSDNLVRHIRTHTGEKPFACDICGRKFAQAGHLASHTKIHTGEKPFQCRICMRKFARKDNLKNHTKIHLR

SEQ ID NO: 406 - protein, 202 aa, Artificial Sequence
  Synthetic
MPDFTIIQPDRKFDAAAVAGIFVRSSTSSSFPSASSYIAAKKRKNVDNTSTRKPYSYKDRKRKNTEEIRNIKKKLFMDLGIVRTNCGIDNEKQDREKAMKRKVTETIVTTYCELCEQNFSSSKMLLLHRGKVHNTPYIECHLCMKLFSQTIQFNRHMKTHYGPNAKIYVQCELCDRQFKDKQSLRTHWDVSHGSGDNQAVLA

SEQ ID NO: 407 - protein, 1068 aa, Artificial Sequence
  Synthetic
MVSSDRPVSLEDEVSHSMKEMIGGCCVCSDERGWAENPLVYCDGHGCSVAVHQACYGIVQVPTGPWFCRKCESQERAARVRCELCPHKDGALKRTDNGGWAHVVCALYIPEVQFANVSTMEPIVLQSVPHDRYNKTCYICDEQGRESKAATGACMTCNKHGCRQAFHVTCAQFAGLLCEEEGNGADNVQYCGYCKYHFSKLKKSKRGSNRSYDQSLSDSSSHSQDKHHEKEKKKYKEKDKHKQKHKKQPEPSPALVPSLTVTTEKTYTSTSNNSISGSLKRLEDTTARFTNANFQEVSAHTSSGKDVSETRGSEGKGKKSSAHSSGQRGRKPGGGRNPGTTVSAASPFPQGSFSGTPGSVKSSSGSSVQSPQDFLSFTDSDLRNDSYSHSQQSSATKDVHKGESGSQEGGVNSFSTLIGLPSTSAVTSQPKSFENSPGDLGNSSLPTAGYKRAQTSGIEEETVKEKKRKGNKQSKHGPGRPKGNKNQENVSHLSVSSASPTSSVASAAGSITSSSLQKSPTLLRNGSLQSLSVGSSPVGSEISMQYRHDGACPTTTFSELLNAIHNGIYNSNDVAVSFPNVVSGSGSSTPVSSSHLPQQSSGHLQQVGALSPSAVSSAAPAVATTQANTLSGSSLSQAPSHMYGNRSNSSMAALIAQSENNQTDQDLGDNSRNLVGRGSSPRGSLSPRSPVSSLQIRYDQPGNSSLENLPPVAASIEQLLERQWSEGQQFLLEQGTPSDILGMLKSLHQLQVENRRLEEQIKNLTAKKERLQLLNAQLSVPFPTITANPSPSHQIHTFSAQTAPTTDSLNSSKSPHIGNSFLPDNSLPVLNQDLTSSGQSTSSSSALSTPPPAGQSPAQQGSGVSGVQQVNGVTVGALASGMQPVTSTIPAVSAVGGIIGALPGNQLAINGIVGALNGVMQTPVTMSQNPTPLTHTTVPPNATHPMPATLTNSASGLGLLSDQQRQILIHQQQFQQLLNSQQLTPEQHQAFLYQLMQHHHQQHHQPELQQLQIPGPTQIPINNLLAGTQAPPLHTATTNPFLTIHGDNASQKVARLSDKTGPVAQEKS

SEQ ID NO: 408 - protein, 1169 aa, Artificial Sequence
  Synthetic
MAEEEVAKLEKHLMLLRQEYVKLQKKLAETEKRCALLAAQANKESSSESFISRLLAIVADLYEQEQYSDLKIKVGDRHISAHKFVLAARSDSWSLANLSSTKELDLSDANPEVTMTMLRWIYTDELEFREDDVFLTELMKLANRFQLQLLRERCEKGVMSLVNVRNCIRFYQTAEELNASTLMNYCAEIIASHWDDLRKEDFSSMSAQLLYKMIKSKTEYPLHKAIKVEREDVVFLYLIEMDSQLPGKLNEADHNGDLALDLALSRRLESIATTLVSHKADVDMVDKSGWSLLHKGIQRGDLFAATFLIKNGAFVNAATLGAQETPLHLVALYSSKKHSADVMSEMAQIAEALLQAGANPNMQDSKGRTPLHVSIMAGNEYVFSQLLQCKQLDLELKDHEGSTALWLAVQHITVSSDQSVNPFEDVPVVNGTSFDENSFAARLIQRGSHTDAPDTATGNCLLQRAAGAGNEAAALFLATNGAHVNHRNKWGETPLHTACRHGLANLTAELLQQGANPNLQTEEALPLPKEAASLTSLADSVHLQTPLHMAIAYNHPDVVSVILEQKANALHATNNLQIIPDFSLKDSRDQTVLGLALWTGMHTIAAQLLGSGAAINDTMSDGQTLLHMAIQRQDSKSALFLLEHQADINVRTQDGETALQLAIRNQLPLVVDAICTRGADMSVPDEKGNPPLWLALANNLEDIASTLVRHGCDATCWGPGPGGCLQTLLHRAIDENNEPTACFLIRSGCDVNSPRQPGANGEGEEEARDGQTPLHLAASWGLEETVQCLLEFGANVNAQDAEGRTPIHVAISSQHGVIIQLLVSHPDIHLNVRDRQGLTPFACAMTFKNNKSAEAILKRESGAAEQVDNKGRNFLHVAVQNSDIESVLFLISVHANVNSRVQDASKLTPLHLAVQAGSEIIVRNLLLAGAKVNELTKHRQTALHLAAQQDLPTICSVLLENGVDFAAVDENGNNALHLAVMHGRLNNIRVLLTECTVDAEAFNLRGQSPLHILGQYGKENAAAIFDLFLECMPGYPLDKPDADGSTVLLLAYMKGNANLCRAIVRSGARLGVNNNQGVNIFNYQVATKQLLFRLLDMLSKEPPWCDGSYCYECTARFGVTTRKHHCRHCGRLLCHKCSTKEIPIIKFDLNKPVRVCNICFDVLTLGGVS

SEQ ID NO: 409 - protein, 1089 aa, Artificial Sequence
  Synthetic
MGNTTTKFRKALINGDENLACQIYENNPQLKESLDPNTSYGEPYQHNTPLHYAARHGMNKILGTFLGRDGNPNKRNVHNETSMHLLCMGPQIMISEGALHPRLARPTEDDFRRADCLQMILKWKGAKLDQGEYERAAIDAVDNKKNTPLHYAAASGMKACVELLVKHGGDLFAENENKDTPCDCAEKQHHKDLALNLESQMVFSRDPEAEEIEAEYAALDKREPYEGLRPQDLRRLKDMLIVETADMLQAPLFTAEALLRAHDWDREKLLEAWMSNPENCCQRSGVQMPTPPPSGYNAWDTLPSPRTPRTTRSSVTSPDEISLSPGDLDTSLCDICMCSISVFEDPVDMPCGHDFCRGCWESFLNLKIQEGEAHNIFCPAYDCFQLVPVDIIESVVSKEMDKRYLQFDIKAFVENNPAIKWCPTPGCDRAVRLTKQGSNTSGSDTLSFPLLRAPAVDCGKGHLFCWECLGEAHEPCDCQTWKNWLQKITEMKPEELVGVSEAYEDAANCLWLLTNSKPCANCKSPIQKNEGCNHMQCAKCKYDFCWICLEEWKKHSSSTGGYYRCTRYEVIQHVEEQSKEMTVEAEKKHKRFQELDRFMHYYTRFKNHEHSYQLEQRLLKTAKEKMEQLSRALKETEGGCPDTTFIEDAVHVLLKTRRILKCSYPYGFFLEPKSTKKEIFELMQTDLEMVTEDLAQKVNRPYLRTPRHKIIKAACLVQQKRQEFLASVARGVAPADSPEAPRRSFAGGTWDWEYLGFASPEEYAEFQYRRRHRQRRRGDVHSLLSNPPDPDEPSESTLDIPEGGSSSRRPGTSVVSSASMSVLHSSSLRDYTPASRSENQDSLQALSSLDEDDPNILLAIQLSLQESGLALDEETRDFLSNEASLGAIGTSLPSRLDSVPRNTDSPRAALSSSELLELGDSLMRLGAENDPFSTDTLSSHPLSEARSDFCPSSSDPDSAGQDPNINDNLLGNIMAWFHDMNPQSIALIPPATTEISADSQLPCIKDGSEGVKDVELVLPEDSMFEDASVSEGRGTQIEENPLEENILAGEAASQAGDSGNEAANRGDGSDVSSQTPQTSSDWLEQVHLV

SEQ ID NO: 410 - protein, 574 aa, Artificial Sequence
  Synthetic
MATLVVNKLGAGVDSGRQGSRGTAVVKVLECGVCEDVFSLQGDKVPRLLLCGHTVCHDCLTRLPLHGRAIRCPFDRQVTDLGDSGVWGLKKNFALLELLERLQNGPIGQYGAAEESIGISGESIIRCDEDEAHLASVYCTVCATHLCSECSQVTHSTKTLAKHRRVPLADKPHEKTMCSQHQVHAIEFVCLEEGCQTSPLMCCVCKEYGKHQGHKHSVLEPEANQIRASILDMAHCIRTFTEEISDYSRKLVGIVQHIEGGEQIVEDGIGMAHTEHVPGTAENARSCIRAYFYDLHETLCRQEEMALSVVDAHVREKLIWLRQQQEDMTILLSEVSAACLHCEKTLQQDDCRVVLAKQEITRLLETLQKQQQQFTEVADHIQLDASIPVTFTKDNRVHIGPKMEIRVVTLGLDGAGKTTILFKLKQDEFMQPIPTIGFNVETVEYKNLKFTIWDVGGKHKLRPLWKHYYLNTQAVVFVVDSSHRDRISEAHSELAKLLTEKELRDALLLIFANKQDVAGALSVEEITELLSLHKLCCGRSWYIQGCDARSGMGLYEGLDWLSRQLVAAGVLDVA

SEQ ID NO: 411 - protein, 898 aa, Artificial Sequence
  Synthetic
MFSQQQQQQLQQQQQQLQQLQQQQLQQQQLQQQQLLQLQQLLQQSPPQAPLPMAVSRGLPPQQPQQPLLNLQGTNSASLLNGSMLQRALLLQQLQGLDQFAMPPATYDTAGLTMPTATLGNLRGYGMASPGLAAPSLTPPQLATPNLQQFFPQATRQSLLGPPPVGVPMNPSQFNLSGRNPQKQARTSSSTTPNRKDSSSQTMPVEDKSDPPEGSEEAAEPRMDTPEDQDLPPCPEDIAKEKRTPAPEPEPCEASELPAKRLRSSEEPTEKEPPGQLQVKAQPQARMTVPKQTQTPDLLPEALEAQVLPRFQPRVLQVQAQVQSQTQPRIPSTDTQVQPKLQKQAQTQTSPEHLVLQQKQVQPQLQQEAEPQKQVQPQVQPQAHSQGPRQVQLQQEAEPLKQVQPQVQPQAHSQPPRQVQLQLQKQVQTQTYPQVHTQAQPSVQPQEHPPAQVSVQPPEQTHEQPHTQPQVSLLAPEQTPVVVHVCGLEMPPDAVEAGGGMEKTLPEPVGTQVSMEEIQNESACGLDVGECENRAREMPGVWGAGGSLKVTILQSSDSRAFSTVPLTPVPRPSDSVSSTPAATSTPSKQALQFFCYICKASCSSQQEFQDHMSEPQHQQRLGEIQHMSQACLLSLLPVPRDVLETEDEEPPPRRWCNTCQLYYMGDLIQHRRTQDHKIAKQSLRPFCTVCNRYFKTPRKFVEHVKSQGHKDKAKELKSLEKEIAGQDEDHFITVDAVGCFEGDEEEEEDDEDEEEIEVEEELCKQVRSRDISREEWKGSETYSPNTAYGVDFLVPVMGYICRICHKFYHSNSGAQLSHCKSLGHFENLQKYKAAKNPSPTTRPVSRRCAINARNALTALFTSSGRPPSQPNTQDKTPSKVTARPSQPPLPRRSTRLKT

SEQ ID NO: 412 - protein, 7 aa, Artificial Sequence
  Synthetic
PKKKRKV

SEQ ID NO: 413 - protein, 8 aa, Artificial Sequence
  Synthetic
VSRKRPRP

SEQ ID NO: 414 - protein, 9 aa, Artificial Sequence
  Synthetic
PAAKRVKLD

SEQ ID NO: 415 - protein, 9 aa, Artificial Sequence
  Synthetic
KLKIKRPVK

SEQ ID NO: 416 - protein, 10 aa, Artificial Sequence
  Synthetic
EGAPPAKRAR

SEQ ID NO: 417 - protein, 12 aa, Artificial Sequence
  Synthetic
PPQPKKKPLDGE

SEQ ID NO: 418 - protein, 19 aa, Artificial Sequence
  Synthetic
MKRTADGSEFESPKKKRKV

SEQ ID NO: 419 - protein, 20 aa, Artificial Sequence
  Synthetic
AVKRPAATKKAGQAKKKKLD

SEQ ID NO: 420 - protein, 21 aa, Artificial Sequence
  Synthetic
SGGSKRTADGSEFEPKKKRKV

SEQ ID NO: 421 - protein, 25 aa, Artificial Sequence
  Synthetic
MSRRRKANPTKLSENAKKLAKEVEN

SEQ ID NO: 422 - protein, 30 aa, Artificial Sequence
  Synthetic
MDSLLMNRRKFLYQFKNVRWAKGRRETYLC

SEQ ID NO: 423 - DNA, 18 bp, Artificial Sequence
  Synthetic
gctaaaaaagacactgaa

SEQ ID NO: 424 - DNA, 18 bp, Artificial Sequence
  Synthetic
taaaaaaaaaagtctgga

SEQ ID NO: 425 - DNA, 18 bp, Artificial Sequence
  Synthetic
tctgaaaaaagctctgca

SEQ ID NO: 426 - DNA, 18 bp, Artificial Sequence
  Synthetic
tcctaaaaagactctcca

SEQ ID NO: 427 - DNA, 18 bp, Artificial Sequence
  Synthetic
ttacttatatctatacct

SEQ ID NO: 428 - DNA, 18 bp, Artificial Sequence
  Synthetic
ctgcttctctctttactt

SEQ ID NO: 429 - DNA, 18 bp, Artificial Sequence
  Synthetic
aaaatactatctctacct

SEQ ID NO: 430 - DNA, 18 bp, Artificial Sequence
  Synthetic
tctcaaaccaactataca

SEQ ID NO: 431 - DNA, 18 bp, Artificial Sequence
  Synthetic
tctcaaaaaaacaaaaca

SEQ ID NO: 432 - DNA, 18 bp, Artificial Sequence
  Synthetic
atactcatgtctttaccc

SEQ ID NO: 433 - DNA, 18 bp, Artificial Sequence
  Synthetic
tagctactatctgtacct

SEQ ID NO: 434 - DNA, 18 bp, Artificial Sequence
  Synthetic
ttactacagtcattacat

SEQ ID NO: 435 - DNA, 18 bp, Artificial Sequence
  Synthetic
ttcctcctttcttaacat

SEQ ID NO: 436 - DNA, 18 bp, Artificial Sequence
  Synthetic
ctccacctgtctttacct

SEQ ID NO: 437 - DNA, 18 bp, Artificial Sequence
  Synthetic
tctgaaaaagacattcca

SEQ ID NO: 438 - DNA, 18 bp, Artificial Sequence
  Synthetic
gctaaaagagactcagcc

SEQ ID NO: 439 - DNA, 18 bp, Artificial Sequence
  Synthetic
atccttctgtctttaatt

SEQ ID NO: 440 - DNA, 18 bp, Artificial Sequence
  Synthetic
gctaaaacaaactttgta

SEQ ID NO: 441 - DNA, 18 bp, Artificial Sequence
  Synthetic
tttatacagtgtttaact

SEQ ID NO: 442 - DNA, 18 bp, Artificial Sequence
  Synthetic
actctaaaaaactcttaa

SEQ ID NO: 443 - DNA, 18 bp, Artificial Sequence
  Synthetic
acgctaaactctttacct

SEQ ID NO: 444 - DNA, 18 bp, Artificial Sequence
  Synthetic
taactaccttctttacca

SEQ ID NO: 445 - DNA, 18 bp, Artificial Sequence
  Synthetic
ctacttctaccttcacct

SEQ ID NO: 446 - DNA, 18 bp, Artificial Sequence
  Synthetic
actaaaaaaaagtgtgga

SEQ ID NO: 447 - DNA, 18 bp, Artificial Sequence
  Synthetic
attctactggcattacat

SEQ ID NO: 448 - DNA, 18 bp, Artificial Sequence
  Synthetic
ttgcaactatcctttccc

SEQ ID NO: 449 - DNA, 18 bp, Artificial Sequence
  Synthetic
aattaaaaacaatatgca

SEQ ID NO: 450 - DNA, 18 bp, Artificial Sequence
  Synthetic
atccacctgtcttggcct

SEQ ID NO: 451 - DNA, 18 bp, Artificial Sequence
  Synthetic
tctaaaaaagaatcaaaa

SEQ ID NO: 452 - DNA, 18 bp, Artificial Sequence
  Synthetic
aaattactatctgtacct

SEQ ID NO: 453 - DNA, 18 bp, Artificial Sequence
  Synthetic
atgcttctctatttacct

SEQ ID NO: 454 - DNA, 18 bp, Artificial Sequence
  Synthetic
atcctattttctttaatg

SEQ ID NO: 455 - DNA, 18 bp, Artificial Sequence
  Synthetic
ctacaaatgactttccct

SEQ ID NO: 456 - DNA, 18 bp, Artificial Sequence
  Synthetic
gcacaaaaaaactctact

SEQ ID NO: 457 - DNA, 18 bp, Artificial Sequence
  Synthetic
ttgcctctgtcttcacca

SEQ ID NO: 458 - DNA, 18 bp, Artificial Sequence
  Synthetic
actcaaaaacactcagta

SEQ ID NO: 459 - DNA, 18 bp, Artificial Sequence
  Synthetic
ctaataccatctttacct

SEQ ID NO: 460 - DNA, 18 bp, Artificial Sequence
  Synthetic
ctgcaattgtctttcctt

SEQ ID NO: 461 - DNA, 18 bp, Artificial Sequence
  Synthetic
tcttaatcagacactaaa

SEQ ID NO: 462 - DNA, 18 bp, Artificial Sequence
  Synthetic
atgttattatctttacca

SEQ ID NO: 463 - DNA, 18 bp, Artificial Sequence
  Synthetic
ttgacaccctctttccct

SEQ ID NO: 464 - DNA, 18 bp, Artificial Sequence
  Synthetic
tctcaaaaagactcagcc

SEQ ID NO: 465 - DNA, 18 bp, Artificial Sequence
  Synthetic
aataaaaactactctaca

SEQ ID NO: 466 - DNA, 18 bp, Artificial Sequence
  Synthetic
tctcaaaacaactctgta

SEQ ID NO: 467 - DNA, 18 bp, Artificial Sequence
  Synthetic
atgaaaatgtcattaaat

SEQ ID NO: 468 - DNA, 18 bp, Artificial Sequence
  Synthetic
ttccttctctctttccct

SEQ ID NO: 469 - DNA, 18 bp, Artificial Sequence
  Synthetic
ttactaatgccttttcct

SEQ ID NO: 470 - DNA, 18 bp, Artificial Sequence
  Synthetic
atcctacactctcgaccc

SEQ ID NO: 471 - DNA, 18 bp, Artificial Sequence
  Synthetic
cttgcataaaactctgca

SEQ ID NO: 472 - DNA, 18 bp, Artificial Sequence
  Synthetic
attcacgccggaagtcca

SEQ ID NO: 473 - DNA, 18 bp, Artificial Sequence
  Synthetic
acacagggcgaagctgtc

SEQ ID NO: 474 - DNA, 18 bp, Artificial Sequence
  Synthetic
atacaagccggagagcct

SEQ ID NO: 475 - DNA, 18 bp, Artificial Sequence
  Synthetic
gtacacagccgggcggtg

SEQ ID NO: 476 - DNA, 18 bp, Artificial Sequence
  Synthetic
attcaccccccagggcct

SEQ ID NO: 477 - DNA, 18 bp, Artificial Sequence
  Synthetic
tacctcagccggggtgtc

SEQ ID NO: 478 - DNA, 18 bp, Artificial Sequence
  Synthetic
ctccccacctgggctgtc

SEQ ID NO: 479 - DNA, 18 bp, Artificial Sequence
  Synthetic
atgcgcagaggagctgtg

SEQ ID NO: 480 - DNA, 18 bp, Artificial Sequence
  Synthetic
tttcacgcccaatggcaa

SEQ ID NO: 481 - DNA, 18 bp, Artificial Sequence
  Synthetic
ttccgccgcggagattac

SEQ ID NO: 482 - DNA, 18 bp, Artificial Sequence
  Synthetic
aaacgcggcagggctgca

SEQ ID NO: 483 - DNA, 18 bp, Artificial Sequence
  Synthetic
ttcctccacagggctggc

SEQ ID NO: 484 - DNA, 18 bp, Artificial Sequence
  Synthetic
gctcaccccggaatccct

SEQ ID NO: 485 - DNA, 18 bp, Artificial Sequence
  Synthetic
gttctctccgcagaacct

SEQ ID NO: 486 - DNA, 18 bp, Artificial Sequence
  Synthetic
ttatgagggtgagttgtc

SEQ ID NO: 487 - DNA, 18 bp, Artificial Sequence
  Synthetic
tcacccagcctggctgtg

SEQ ID NO: 488 - DNA, 18 bp, Artificial Sequence
  Synthetic
ctcagcgacgtggctgtc

SEQ ID NO: 489 - DNA, 18 bp, Artificial Sequence
  Synthetic
actcccgccccagggcct

SEQ ID NO: 490 - DNA, 18 bp, Artificial Sequence
  Synthetic
gaagggggcggggcttcc

SEQ ID NO: 491 - DNA, 18 bp, Artificial Sequence
  Synthetic
cttcccaccagctggcct

SEQ ID NO: 492 - DNA, 18 bp, Artificial Sequence
  Synthetic
gtaggcgccggcggagct

SEQ ID NO: 493 - DNA, 18 bp, Artificial Sequence
  Synthetic
tttcacacaggctgtcct

SEQ ID NO: 494 - DNA, 18 bp, Artificial Sequence
  Synthetic
ggtcacgcagaagggtcc

SEQ ID NO: 495 - DNA, 18 bp, Artificial Sequence
  Synthetic
ctacaccccgcagagact

SEQ ID NO: 496 - DNA, 18 bp, Artificial Sequence
  Synthetic
attcctgccgggggacat

SEQ ID NO: 497 - DNA, 18 bp, Artificial Sequence
  Synthetic
cttcccgccagagtacca

SEQ ID NO: 498 - DNA, 18 bp, Artificial Sequence
  Synthetic
tttccctcctgaggaccc

SEQ ID NO: 499 - DNA, 18 bp, Artificial Sequence
  Synthetic
ctccacccccaggggcct

SEQ ID NO: 500 - DNA, 18 bp, Artificial Sequence
  Synthetic
ttatacagcagagctgtg

SEQ ID NO: 501 - DNA, 18 bp, Artificial Sequence
  Synthetic
gcacacgccgcagaacca

SEQ ID NO: 502 - DNA, 18 bp, Artificial Sequence
  Synthetic
tcacgcagcgagtctgga

SEQ ID NO: 503 - DNA, 18 bp, Artificial Sequence
  Synthetic
ctaccagtcgcgcctgtc

SEQ ID NO: 504 - DNA, 18 bp, Artificial Sequence
  Synthetic
catcacccccgggagcct

SEQ ID NO: 505 - DNA, 18 bp, Artificial Sequence
  Synthetic
atccacagctgggcagtc

SEQ ID NO: 506 - DNA, 18 bp, Artificial Sequence
  Synthetic
gtacccaggaggcctgtc

SEQ ID NO: 507 - DNA, 18 bp, Artificial Sequence
  Synthetic
tgacaagccccagggcct

SEQ ID NO: 508 - DNA, 18 bp, Artificial Sequence
  Synthetic
ttacagggcaggactagc

SEQ ID NO: 509 - DNA, 18 bp, Artificial Sequence
  Synthetic
ccaggcggcgcggccctc

SEQ ID NO: 510 - DNA, 18 bp, Artificial Sequence
  Synthetic
ttagggaacagggctgtt

SEQ ID NO: 511 - DNA, 18 bp, Artificial Sequence
  Synthetic
atacgtgacaggcctgta

SEQ ID NO: 512 - DNA, 18 bp, Artificial Sequence
  Synthetic
gtgctccccggaggccct

SEQ ID NO: 513 - DNA, 18 bp, Artificial Sequence
  Synthetic
tgacccggcagggaggcc

SEQ ID NO: 514 - DNA, 18 bp, Artificial Sequence
  Synthetic
gggaggggcggagctgtc

SEQ ID NO: 515 - DNA, 18 bp, Artificial Sequence
  Synthetic
tgacaaggcggggtcgcc

SEQ ID NO: 516 - DNA, 18 bp, Artificial Sequence
  Synthetic
gtccaggctgcagagcca

SEQ ID NO: 517 - DNA, 18 bp, Artificial Sequence
  Synthetic
gttctcagcaaagagcct

SEQ ID NO: 518 - DNA, 18 bp, Artificial Sequence
  Synthetic
tcacctctcggggctggc

SEQ ID NO: 519 - DNA, 18 bp, Artificial Sequence
  Synthetic
ctacaccccggacggcca

SEQ ID NO: 520 - DNA, 18 bp, Artificial Sequence
  Synthetic
gtgcctcctgcagggcct

SEQ ID NO: 521 - DNA, 18 bp, Artificial Sequence
  Synthetic
ctacgccgcagagcattc

SEQ ID NO: 522 - DNA, 18 bp, Artificial Sequence
  Synthetic
aagtaaagatagtagtaa

SEQ ID NO: 523 - DNA, 18 bp, Artificial Sequence
  Synthetic
aggaaaagagagaaggca

SEQ ID NO: 524 - DNA, 18 bp, Artificial Sequence
  Synthetic
agctaaggtcagtggcag

SEQ ID NO: 525 - DNA, 18 bp, Artificial Sequence
  Synthetic
agtggagtgtttttcagt

SEQ ID NO: 526 - DNA, 18 bp, Artificial Sequence
  Synthetic
tgcagagtcttgctctgt

SEQ ID NO: 527 - DNA, 18 bp, Artificial Sequence
  Synthetic
tgttgtgttctttttaga

SEQ ID NO: 528 - DNA, 18 bp, Artificial Sequence
  Synthetic
aggtaaagaaagaagaaa

SEQ ID NO: 529 - DNA, 18 bp, Artificial Sequence
  Synthetic
agagaaagtcagtagcat

SEQ ID NO: 530 - DNA, 18 bp, Artificial Sequence
  Synthetic
tgtagaggctttctcaaa

SEQ ID NO: 531 - DNA, 18 bp, Artificial Sequence
  Synthetic
agctgactctttttctga

SEQ ID NO: 532 - DNA, 18 bp, Artificial Sequence
  Synthetic
tgaataggctttttcatt

SEQ ID NO: 533 - DNA, 18 bp, Artificial Sequence
  Synthetic
tttaaagttttttttaga

SEQ ID NO: 534 - DNA, 18 bp, Artificial Sequence
  Synthetic
ggaagatgctttttctga

SEQ ID NO: 535 - DNA, 18 bp, Artificial Sequence
  Synthetic
atgtagagacagggggaa

SEQ ID NO: 536 - DNA, 18 bp, Artificial Sequence
  Synthetic
agggaaggagagtaggga

SEQ ID NO: 537 - DNA, 18 bp, Artificial Sequence
  Synthetic
tgaagagtattttttatg

SEQ ID NO: 538 - DNA, 18 bp, Artificial Sequence
  Synthetic
aggtaaagagaacagtat

SEQ ID NO: 539 - DNA, 18 bp, Artificial Sequence
  Synthetic
ttctgagtcttttttagc

SEQ ID NO: 540 - DNA, 18 bp, Artificial Sequence
  Synthetic
tggaaaagagagtaggag

SEQ ID NO: 541 - DNA, 18 bp, Artificial Sequence
  Synthetic
tgcaatttttttttgaga

SEQ ID NO: 542 - DNA, 18 bp, Artificial Sequence
  Synthetic
tgtcaagtatttttcaga

SEQ ID NO: 543 - DNA, 18 bp, Artificial Sequence
  Synthetic
tcttcagtctttttcaga

SEQ ID NO: 544 - DNA, 18 bp, Artificial Sequence
  Synthetic
aggtaaagactggatcat

SEQ ID NO: 545 - DNA, 18 bp, Artificial Sequence
  Synthetic
tgcagtatttgtttcagt

SEQ ID NO: 546 - DNA, 18 bp, Artificial Sequence
  Synthetic
cggagatttttttttaga

SEQ ID NO: 547 - DNA, 18 bp, Artificial Sequence
  Synthetic
gggtgaacagagtagtaa

SEQ ID NO: 548 - DNA, 18 bp, Artificial Sequence
  Synthetic
aggtgaatacagtggtat

SEQ ID NO: 549 - DNA, 18 bp, Artificial Sequence
  Synthetic
tgttgtgtttttttgaga

SEQ ID NO: 550 - DNA, 18 bp, Artificial Sequence
  Synthetic
agaaaaagacaatagtat

SEQ ID NO: 551 - DNA, 18 bp, Artificial Sequence
  Synthetic
tttagagtttgtttgata

SEQ ID NO: 552 - DNA, 18 bp, Artificial Sequence
  Synthetic
ttcatatactttttcagt

SEQ ID NO: 553 - DNA, 18 bp, Artificial Sequence
  Synthetic
tgcagtgtgttttttagg

SEQ ID NO: 554 - DNA, 18 bp, Artificial Sequence
  Synthetic
tgcatagttttgtataga

SEQ ID NO: 555 - DNA, 18 bp, Artificial Sequence
  Synthetic
aggttaaaagagttgaac

SEQ ID NO: 556 - DNA, 18 bp, Artificial Sequence
  Synthetic
tgtaaaggctttttttgg

SEQ ID NO: 557 - DNA, 18 bp, Artificial Sequence
  Synthetic
aagttatgacagtattag

SEQ ID NO: 558 - DNA, 18 bp, Artificial Sequence
  Synthetic
atatgaatttttttcaga

SEQ ID NO: 559 - DNA, 18 bp, Artificial Sequence
  Synthetic
tgtaggttctttttttgt

SEQ ID NO: 560 - DNA, 18 bp, Artificial Sequence
  Synthetic
aggtaaatatagtcgtag

SEQ ID NO: 561 - DNA, 18 bp, Artificial Sequence
  Synthetic
tggagattttttttctat

SEQ ID NO: 562 - DNA, 18 bp, Artificial Sequence
  Synthetic
tgcagtgtctatttttgc

SEQ ID NO: 563 - DNA, 18 bp, Artificial Sequence
  Synthetic
aagtgctgtcagtagtat

SEQ ID NO: 564 - DNA, 18 bp, Artificial Sequence
  Synthetic
agaaaaagaatgtagtat

SEQ ID NO: 565 - DNA, 18 bp, Artificial Sequence
  Synthetic
aggtaaaaacataagtgt

SEQ ID NO: 566 - DNA, 18 bp, Artificial Sequence
  Synthetic
tgcagagtgtttctcaga

SEQ ID NO: 567 - DNA, 18 bp, Artificial Sequence
  Synthetic
tcaagattttgtttcaga

SEQ ID NO: 568 - DNA, 18 bp, Artificial Sequence
  Synthetic
tgcagagacttgtgctgt

SEQ ID NO: 569 - DNA, 18 bp, Artificial Sequence
  Synthetic
tgcagagtgtttttccta

SEQ ID NO: 570 - DNA, 18 bp, Artificial Sequence
  Synthetic
aggtgaagacagtttttt

SEQ ID NO: 571 - DNA, 20 bp, Artificial Sequence
  Synthetic
atagacaattttcttcttta

SEQ ID NO: 572 - DNA, 12 bp, Artificial Sequence
  Synthetic
ctataatgttag

SEQ ID NO: 573 - DNA, 11 bp, Artificial Sequence
  Synthetic
cacaggcctgc

SEQ ID NO: 574 - DNA, 17 bp, Artificial Sequence
  Synthetic
cgcatgtagctagggaa

SEQ ID NO: 575 - DNA, 11 bp, Artificial Sequence
  Synthetic
gatgatacatt

SEQ ID NO: 576 - DNA, 17 bp, Artificial Sequence
  Synthetic
tttttttttttttttga

SEQ ID NO: 577 - DNA, 11 bp, Artificial Sequence
  Synthetic
gctatcccatg

SEQ ID NO: 578 - DNA, 10 bp, Artificial Sequence
  Synthetic
ttttaaagag

SEQ ID NO: 579 - DNA, 12 bp, Artificial Sequence
  Synthetic
aaacaaaaaaaa

SEQ ID NO: 580 - DNA, 17 bp, Artificial Sequence
  Synthetic
attcctttgagaatttc

SEQ ID NO: 581 - DNA, 17 bp, Artificial Sequence
  Synthetic
tacagaaaaaaaaaaag

SEQ ID NO: 582 - DNA, 11 bp, Artificial Sequence
  Synthetic
ataattttgtg

SEQ ID NO: 583 - DNA, 17 bp, Artificial Sequence
  Synthetic
atcagttataatcattt

SEQ ID NO: 584 - DNA, 18 bp, Artificial Sequence
  Synthetic
tgcgcacacactgtttgg

SEQ ID NO: 585 - DNA, 10 bp, Artificial Sequence
  Synthetic
gttatagaaa

SEQ ID NO: 586 - DNA, 20 bp, Artificial Sequence
  Synthetic
agttgctttgtcaggacaag

SEQ ID NO: 587 - DNA, 10 bp, Artificial Sequence
  Synthetic
caccttcatt

SEQ ID NO: 588 - DNA, 18 bp, Artificial Sequence
  Synthetic
ttattgaaaatttccaac

SEQ ID NO: 589 - DNA, 18 bp, Artificial Sequence
  Synthetic
cctactgggtgtttcttt

SEQ ID NO: 590 - DNA, 19 bp, Artificial Sequence
  Synthetic
gtgctttgcagtttatttt

SEQ ID NO: 591 - DNA, 11 bp, Artificial Sequence
  Synthetic
gcattatccta

SEQ ID NO: 592 - DNA, 20 bp, Artificial Sequence
  Synthetic
cttagagacatgtgaggtcc

SEQ ID NO: 593 - DNA, 18 bp, Artificial Sequence
  Synthetic
tttcacttatgaattcat

SEQ ID NO: 594 - DNA, 20 bp, Artificial Sequence
  Synthetic
atactagaggcaaaaaaggt

SEQ ID NO: 595 - DNA, 20 bp, Artificial Sequence
  Synthetic
cttagctcctgtggtgggta

SEQ ID NO: 596 - DNA, 12 bp, Artificial Sequence
  Synthetic
tgttccatcatt

SEQ ID NO: 597 - DNA, 19 bp, Artificial Sequence
  Synthetic
aataaaaaacaaaaatagt

SEQ ID NO: 598 - DNA, 11 bp, Artificial Sequence
  Synthetic
tgtccttcaac

SEQ ID NO: 599 - DNA, 11 bp, Artificial Sequence
  Synthetic
ccgaatttttt

SEQ ID NO: 600 - DNA, 15 bp, Artificial Sequence
  Synthetic
taattgtttaaaaaa

SEQ ID NO: 601 - DNA, 18 bp, Artificial Sequence
  Synthetic
ttaaatttgtaagcattt

SEQ ID NO: 602 - DNA, 15 bp, Artificial Sequence
  Synthetic
atgtatatatacaca

SEQ ID NO: 603 - DNA, 18 bp, Artificial Sequence
  Synthetic
agccagctctttgataac

SEQ ID NO: 604 - DNA, 18 bp, Artificial Sequence
  Synthetic
ttccctgaaagataacaa

SEQ ID NO: 605 - DNA, 15 bp, Artificial Sequence
  Synthetic
ggggaatacttggta

SEQ ID NO: 606 - DNA, 10 bp, Artificial Sequence
  Synthetic
tatttctata

SEQ ID NO: 607 - DNA, 13 bp, Artificial Sequence
  Synthetic
gtcacacagcata

SEQ ID NO: 608 - DNA, 19 bp, Artificial Sequence
  Synthetic
tggagattaggatttcaac

SEQ ID NO: 609 - DNA, 17 bp, Artificial Sequence
  Synthetic
cctatctgcttgttgtt

SEQ ID NO: 610 - DNA, 13 bp, Artificial Sequence
  Synthetic
gtttcaaggtcta

SEQ ID NO: 611 - DNA, 18 bp, Artificial Sequence
  Synthetic
acagtctcctcaagacaa

SEQ ID NO: 612 - DNA, 16 bp, Artificial Sequence
  Synthetic
ctttctcctagtagtc

SEQ ID NO: 613 - DNA, 14 bp, Artificial Sequence
  Synthetic
ctagctatcaactc

SEQ ID NO: 614 - DNA, 18 bp, Artificial Sequence
  Synthetic
aggtaagaaacaaattat

SEQ ID NO: 615 - DNA, 10 bp, Artificial Sequence
  Synthetic
tttatttcct

SEQ ID NO: 616 - DNA, 19 bp, Artificial Sequence
  Synthetic
tcttgataagggtgttggt

SEQ ID NO: 617 - DNA, 11 bp, Artificial Sequence
  Synthetic
tcacccctaca

SEQ ID NO: 618 - DNA, 16 bp, Artificial Sequence
  Synthetic
cctctggtcacaacat

SEQ ID NO: 619 - DNA, 20 bp, Artificial Sequence
  Synthetic
ctcaaatctattctccaccc

SEQ ID NO: 620 - DNA, 11 bp, Artificial Sequence
  Synthetic
ttctgaacaaa

SEQ ID NO: 621 - DNA, 11 bp, Artificial Sequence
  Synthetic
tggcattctca

SEQ ID NO: 622 - DNA, 19 bp, Artificial Sequence
  Synthetic
gcatttctgccgtttagaa

SEQ ID NO: 623 - DNA, 16 bp, Artificial Sequence
  Synthetic
actggaagcaagaggg

SEQ ID NO: 624 - DNA, 17 bp, Artificial Sequence
  Synthetic
gaggcgctgaaggaggc

SEQ ID NO: 625 - DNA, 14 bp, Artificial Sequence
  Synthetic
cgtgtgcagggaca

SEQ ID NO: 626 - DNA, 19 bp, Artificial Sequence
  Synthetic
atagtccctgaaaggaggg

SEQ ID NO: 627 - DNA, 10 bp, Artificial Sequence
  Synthetic
cgtgtggcga

SEQ ID NO: 628 - DNA, 11 bp, Artificial Sequence
  Synthetic
agtgagaaagt

SEQ ID NO: 629 - DNA, 18 bp, Artificial Sequence
  Synthetic
aatctgttaaagctgtgt

SEQ ID NO: 630 - DNA, 17 bp, Artificial Sequence
  Synthetic
ttgttgtgggagaacaa

SEQ ID NO: 631 - DNA, 18 bp, Artificial Sequence
  Synthetic
gatgacgtaggtgggcag

SEQ ID NO: 632 - DNA, 15 bp, Artificial Sequence
  Synthetic
cagggcagaggtgaa

SEQ ID NO: 633 - DNA, 10 bp, Artificial Sequence
  Synthetic
cctttgcctg

SEQ ID NO: 634 - DNA, 11 bp, Artificial Sequence
  Synthetic
cattctcttga

SEQ ID NO: 635 - DNA, 19 bp, Artificial Sequence
  Synthetic
aggaactaggatttcaccg

SEQ ID NO: 636 - DNA, 11 bp, Artificial Sequence
  Synthetic
atgcacttctg

SEQ ID NO: 637 - DNA, 13 bp, Artificial Sequence
  Synthetic
tttacataggggg

SEQ ID NO: 638 - DNA, 13 bp, Artificial Sequence
  Synthetic
cgttcccatgcat

SEQ ID NO: 639 - DNA, 19 bp, Artificial Sequence
  Synthetic
acctgtcccagtctcctgc

SEQ ID NO: 640 - DNA, 16 bp, Artificial Sequence
  Synthetic
ctccgtgttcccgtgg

SEQ ID NO: 641 - DNA, 14 bp, Artificial Sequence
  Synthetic
ggcggcagggaccc

SEQ ID NO: 642 - DNA, 14 bp, Artificial Sequence
  Synthetic
gtttagagcaaata

SEQ ID NO: 643 - DNA, 10 bp, Artificial Sequence
  Synthetic
ctgaaggagc

SEQ ID NO: 644 - DNA, 14 bp, Artificial Sequence
  Synthetic
ccgcagcgtacgag

SEQ ID NO: 645 - DNA, 17 bp, Artificial Sequence
  Synthetic
cgctgctgccgggacca

SEQ ID NO: 646 - DNA, 12 bp, Artificial Sequence
  Synthetic
gagcctgactca

SEQ ID NO: 647 - DNA, 13 bp, Artificial Sequence
  Synthetic
acacctgtctgtt

SEQ ID NO: 648 - DNA, 18 bp, Artificial Sequence
  Synthetic
tgcttgcatgtgcccgag

SEQ ID NO: 649 - DNA, 16 bp, Artificial Sequence
  Synthetic
gctggcatctggcagg

SEQ ID NO: 650 - DNA, 17 bp, Artificial Sequence
  Synthetic
aggcacacggggccact

SEQ ID NO: 651 - DNA, 10 bp, Artificial Sequence
  Synthetic
caggtagtcc

SEQ ID NO: 652 - DNA, 16 bp, Artificial Sequence
  Synthetic
catgtactcctatgga

SEQ ID NO: 653 - DNA, 17 bp, Artificial Sequence
  Synthetic
actccactccattagcc

SEQ ID NO: 654 - DNA, 13 bp, Artificial Sequence
  Synthetic
ctcttgaccttgc

SEQ ID NO: 655 - DNA, 15 bp, Artificial Sequence
  Synthetic
ccctccttccccggg

SEQ ID NO: 656 - DNA, 15 bp, Artificial Sequence
  Synthetic
cctgtcgaaaacggt

SEQ ID NO: 657 - DNA, 18 bp, Artificial Sequence
  Synthetic
attagggtgaggagagca

SEQ ID NO: 658 - DNA, 15 bp, Artificial Sequence
  Synthetic
cgtctgattgctgga

SEQ ID NO: 659 - DNA, 20 bp, Artificial Sequence
  Synthetic
gaatcatagcagacagcaac

SEQ ID NO: 660 - DNA, 16 bp, Artificial Sequence
  Synthetic
ggtggccggggccagc

SEQ ID NO: 661 - DNA, 10 bp, Artificial Sequence
  Synthetic
gaaaatctca

SEQ ID NO: 662 - DNA, 14 bp, Artificial Sequence
  Synthetic
gcacctggtccacg

SEQ ID NO: 663 - DNA, 13 bp, Artificial Sequence
  Synthetic
agctccggccaat

SEQ ID NO: 664 - DNA, 11 bp, Artificial Sequence
  Synthetic
ggcagcatgtc

SEQ ID NO: 665 - DNA, 20 bp, Artificial Sequence
  Synthetic
tggggcactggcagcagtga

SEQ ID NO: 666 - DNA, 18 bp, Artificial Sequence
  Synthetic
gggcctggcctggtcctt

SEQ ID NO: 667 - DNA, 14 bp, Artificial Sequence
  Synthetic
tcatgagcgccagg

SEQ ID NO: 668 - DNA, 14 bp, Artificial Sequence
  Synthetic
cctggcgctcatga

SEQ ID NO: 669 - DNA, 20 bp, Artificial Sequence
  Synthetic
ggtgcggacccagtgctcca

SEQ ID NO: 670 - DNA, 15 bp, Artificial Sequence
  Synthetic
gaggctctcagcaca

SEQ ID NO: 671 - DNA, 18 bp, Artificial Sequence
  Synthetic
aggtaaagacaatgtcta

SEQ ID NO: 672 - DNA, 18 bp, Artificial Sequence
  Synthetic
gagagctcttccccgtac

SEQ ID NO: 673 - DNA, 18 bp, Artificial Sequence
  Synthetic
aggatctctagtgtgaag

SEQ ID NO: 674 - DNA, 18 bp, Artificial Sequence
  Synthetic
gaaaacccagccgggtat

SEQ ID NO: 675 - DNA, 18 bp, Artificial Sequence
  Synthetic
aggccctgtggtgcgatt

SEQ ID NO: 676 - DNA, 18 bp, Artificial Sequence
  Synthetic
ggcagccccgacgcactg

SEQ ID NO: 677 - DNA, 18 bp, Artificial Sequence
  Synthetic
aggctctcctgtgtgatg

SEQ ID NO: 678 - DNA, 18 bp, Artificial Sequence
  Synthetic
aagccttccggggggagg

SEQ ID NO: 679 - DNA, 18 bp, Artificial Sequence
  Synthetic
aagccctccagcgtgaag

SEQ ID NO: 680 - DNA, 18 bp, Artificial Sequence
  Synthetic
gacagcttctccttttaa

SEQ ID NO: 681 - DNA, 18 bp, Artificial Sequence
  Synthetic
aggtgttctggcttgagc

SEQ ID NO: 682 - DNA, 18 bp, Artificial Sequence
  Synthetic
aggccctctggtgcctac

SEQ ID NO: 683 - DNA, 18 bp, Artificial Sequence
  Synthetic
aggggctggggtgtgacc

SEQ ID NO: 684 - DNA, 18 bp, Artificial Sequence
  Synthetic
gacagcctatgcaggtaa

SEQ ID NO: 685 - DNA, 18 bp, Artificial Sequence
  Synthetic
gacagcaatgctgagaaa

SEQ ID NO: 686 - DNA, 18 bp, Artificial Sequence
  Synthetic
aggccttagggtgtgaat

SEQ ID NO: 687 - DNA, 18 bp, Artificial Sequence
  Synthetic
agggagtcctgtgtgaag

SEQ ID NO: 688 - DNA, 18 bp, Artificial Sequence
  Synthetic
tggctcagcggcgtgact

SEQ ID NO: 689 - DNA, 18 bp, Artificial Sequence
  Synthetic
gccagccacgtagcgcac

SEQ ID NO: 690 - DNA, 18 bp, Artificial Sequence
  Synthetic
aggctctgtggcatgaaa

SEQ ID NO: 691 - DNA, 18 bp, Artificial Sequence
  Synthetic
gacagtctcgccacccaa

SEQ ID NO: 692 - DNA, 18 bp, Artificial Sequence
  Synthetic
gacagctctgccgcggac

SEQ ID NO: 693 - DNA, 18 bp, Artificial Sequence
  Synthetic
aacagcccattcgtgtat

SEQ ID NO: 694 - DNA, 18 bp, Artificial Sequence
  Synthetic
cacagctctgcagtgtat

SEQ ID NO: 695 - DNA, 18 bp, Artificial Sequence
  Synthetic
gagaaccccgccttctac

SEQ ID NO: 696 - DNA, 18 bp, Artificial Sequence
  Synthetic
gatagtcccgcggcgggg

SEQ ID NO: 697 - DNA, 18 bp, Artificial Sequence
  Synthetic
gatagcccagccccagaa

SEQ ID NO: 698 - DNA, 18 bp, Artificial Sequence
  Synthetic
gcctgccctgctgcctac

SEQ ID NO: 699 - DNA, 18 bp, Artificial Sequence
  Synthetic
gccagccctgcagggcag

SEQ ID NO: 700 - DNA, 18 bp, Artificial Sequence
  Synthetic
tgcccctctgggatgaag

SEQ ID NO: 701 - DNA, 18 bp, Artificial Sequence
  Synthetic
gagacgcccggcgcgtcg

SEQ ID NO: 702 - DNA, 18 bp, Artificial Sequence
  Synthetic
agggcccccggggtgtag

SEQ ID NO: 703 - DNA, 18 bp, Artificial Sequence
  Synthetic
aggacctccggcctggtg

SEQ ID NO: 704 - DNA, 18 bp, Artificial Sequence
  Synthetic
tacagccctgcctctgac

SEQ ID NO: 705 - DNA, 18 bp, Artificial Sequence
  Synthetic
agactggcaggagtgaac

SEQ ID NO: 706 - DNA, 18 bp, Artificial Sequence
  Synthetic
agggactctggcatgtcc

SEQ ID NO: 707 - DNA, 18 bp, Artificial Sequence
  Synthetic
gtcagcctggccgggcac

SEQ ID NO: 708 - DNA, 18 bp, Artificial Sequence
  Synthetic
aggcactcaggcgcaaaa

SEQ ID NO: 709 - DNA, 18 bp, Artificial Sequence
  Synthetic
ggactcttcggtgtggac

SEQ ID NO: 710 - DNA, 18 bp, Artificial Sequence
  Synthetic
agggcctctagtgtgcaa

SEQ ID NO: 711 - DNA, 18 bp, Artificial Sequence
  Synthetic
aggacctcaggtgggggc

SEQ ID NO: 712 - DNA, 18 bp, Artificial Sequence
  Synthetic
gccagctcctccgggtcg

SEQ ID NO: 713 - DNA, 18 bp, Artificial Sequence
  Synthetic
aggccctcggggttgagc

SEQ ID NO: 714 - DNA, 18 bp, Artificial Sequence
  Synthetic
gggcgctcgggcgtggat

SEQ ID NO: 715 - DNA, 18 bp, Artificial Sequence
  Synthetic
aggtactgtggcttgaat

SEQ ID NO: 716 - DNA, 18 bp, Artificial Sequence
  Synthetic
gacagccgctctgtgtga

SEQ ID NO: 717 - DNA, 18 bp, Artificial Sequence
  Synthetic
gccagtcctgcctcatga

SEQ ID NO: 718 - DNA, 18 bp, Artificial Sequence
  Synthetic
tggccgtccggggtgtag

SEQ ID NO: 719 - DNA, 18 bp, Artificial Sequence
  Synthetic
gccagccccgagaggtga

SEQ ID NO: 720 - DNA, 18 bp, Artificial Sequence
  Synthetic
gacggctctgctgagtaa

SEQ ID NO: 721 - DNA, 18 bp, Artificial Sequence
  Synthetic
ctgccagccagcgtgaaa

SEQ ID NO: 722 - DNA, 24 bp, Artificial Sequence
  Synthetic
gtgtggtcaggacaaactgttccc

SEQ ID NO: 723 - DNA, 21 bp, Artificial Sequence
  Synthetic
ggggctgggagaagagaggaa

SEQ ID NO: 724 - DNA, 23 bp, Artificial Sequence
  Synthetic
gtccactctgtgttacccagatc

SEQ ID NO: 725 - DNA, 23 bp, Artificial Sequence
  Synthetic
gccggtttaggtatgggaaccac

SEQ ID NO: 726 - DNA, 21 bp, Artificial Sequence
  Synthetic
ttacccctggatcccctccct

SEQ ID NO: 727 - DNA, 21 bp, Artificial Sequence
  Synthetic
ggtgtgaatccgggaggcaga

SEQ ID NO: 728 - DNA, 28 bp, Artificial Sequence
  Synthetic
ggaacagtgatcagttctgttacctgac

SEQ ID NO: 729 - DNA, 21 bp, Artificial Sequence
  Synthetic
gctactggggagcctgaagtg

SEQ ID NO: 730 - DNA, 21 bp, Artificial Sequence
  Synthetic
tccggattctcctgctgaggc

SEQ ID NO: 731 - DNA, 20 bp, Artificial Sequence
  Synthetic
ccgactgctctgccttctga

SEQ ID NO: 732 - DNA, 20 bp, Artificial Sequence
  Synthetic
ggctaggggaactcgatgtc

SEQ ID NO: 733 - DNA, 23 bp, Artificial Sequence
  Synthetic
gtgatgggctttgttcccaactc

SEQ ID NO: 734 - DNA, 24 bp, Artificial Sequence
  Synthetic
caagatagggccttgctgtgttgc

SEQ ID NO: 735 - DNA, 23 bp, Artificial Sequence
  Synthetic
cctgggatgggaatcagaactgc

SEQ ID NO: 736 - DNA, 24 bp, Artificial Sequence
  Synthetic
caggtattatgttaggccatgggg

SEQ ID NO: 737 - DNA, 22 bp, Artificial Sequence
  Synthetic
cgttctcatggacctgcccagt

SEQ ID NO: 738 - DNA, 32 bp, Artificial Sequence
  Synthetic
ctatcagtgaaatctttgcccattctgtttgc

SEQ ID NO: 739 - DNA, 22 bp, Artificial Sequence
  Synthetic
gggcttccctttcttccactag

SEQ ID NO: 740 - DNA, 21 bp, Artificial Sequence
  Synthetic
cccctctcccaaaaggagagc

SEQ ID NO: 741 - DNA, 22 bp, Artificial Sequence
  Synthetic
gcaagtgatacaaccccaagcc

SEQ ID NO: 742 - DNA, 22 bp, Artificial Sequence
  Synthetic
ccagccttcagtttgccaaggg

SEQ ID NO: 743 - DNA, 22 bp, Artificial Sequence
  Synthetic
gcacaccagaggagagctgctt

SEQ ID NO: 744 - DNA, 21 bp, Artificial Sequence
  Synthetic
cccagtcttgggcagcccttt

SEQ ID NO: 745 - DNA, 23 bp, Artificial Sequence
  Synthetic
gcatttaggacagagagcgaagc

SEQ ID NO: 746 - DNA, 21 bp, Artificial Sequence
  Synthetic
ggcccttgctatgccagggaa

SEQ ID NO: 747 - DNA, 21 bp, Artificial Sequence
  Synthetic
caccattctccctgcctcagc

SEQ ID NO: 748 - DNA, 21 bp, Artificial Sequence
  Synthetic
caggaggctgaggtgggtgaa

SEQ ID NO: 749 - DNA, 21 bp, Artificial Sequence
  Synthetic
gctagcatttgcactcctggg

SEQ ID NO: 750 - DNA, 21 bp, Artificial Sequence
  Synthetic
cacctgtcaccacgcctagct

SEQ ID NO: 751 - DNA, 35 bp, Artificial Sequence
  Synthetic
gtacagagtaacctataagtgtgacatacttttgc

SEQ ID NO: 752 - DNA, 31 bp, Artificial Sequence
  Synthetic
ggggattcagagattgttaaagaacacaagg

SEQ ID NO: 753 - DNA, 31 bp, Artificial Sequence
  Synthetic
gcaccttgtctatttcttagagttgttgagc

SEQ ID NO: 754 - DNA, 21 bp, Artificial Sequence
  Synthetic
agtttgcgtctgagcctggcc

SEQ ID NO: 755 - DNA, 21 bp, Artificial Sequence
  Synthetic
ctgaatggtgagggctccctt

SEQ ID NO: 756 - DNA, 23 bp, Artificial Sequence
  Synthetic
gtctcccaggggaagaatcatag

SEQ ID NO: 757 - DNA, 21 bp, Artificial Sequence
  Synthetic
caggtccacaaacccctccca

SEQ ID NO: 758 - DNA, 21 bp, Artificial Sequence
  Synthetic
tcacccagggtcacacggcta

SEQ ID NO: 759 - DNA, 21 bp, Artificial Sequence
  Synthetic
ggagggggctgtctttctggt

SEQ ID NO: 760 - DNA, 29 bp, Artificial Sequence
  Synthetic
ctcagccatgtcaagcaaatcattcaagc

SEQ ID NO: 761 - DNA, 20 bp, Artificial Sequence
  Synthetic
atgttccaggcgccacgtag

SEQ ID NO: 762 - DNA, 29 bp, Artificial Sequence
  Synthetic
caacacaattcagccatgttctttgtccc

SEQ ID NO: 763 - DNA, 21 bp, Artificial Sequence
  Synthetic
tagggggcacctgtgccagtt

SEQ ID NO: 764 - DNA, 21 bp, Artificial Sequence
  Synthetic
ggccatccctctactcctggt

SEQ ID NO: 765 - DNA, 24 bp, Artificial Sequence
  Synthetic
gaagatcagtcacttggcctctgg

SEQ ID NO: 766 - DNA, 21 bp, Artificial Sequence
  Synthetic
gggcagaatggtcacccagca

SEQ ID NO: 767 - DNA, 27 bp, Artificial Sequence
  Synthetic
gtgcattcaggaagcttctgtttgacc

SEQ ID NO: 768 - DNA, 21 bp, Artificial Sequence
  Synthetic
gcaggaagtgccaggacattg

SEQ ID NO: 769 - DNA, 21 bp, Artificial Sequence
  Synthetic
gctggaggtgatggccaaggt

SEQ ID NO: 770 - DNA, 21 bp, Artificial Sequence
  Synthetic
cccagtactcccacactctgc

SEQ ID NO: 771 - DNA, 23 bp, Artificial Sequence
  Synthetic
gtccaggacaaagctcagtagcc

SEQ ID NO: 772 - DNA, 21 bp, Artificial Sequence
  Synthetic
cagctggccaagcagggatca

SEQ ID NO: 773 - DNA, 21 bp, Artificial Sequence
  Synthetic
gggggagtcggacttagaagg

SEQ ID NO: 774 - DNA, 20 bp, Artificial Sequence
  Synthetic
tgctaggccccgatttgtgg

SEQ ID NO: 775 - DNA, 24 bp, Artificial Sequence
  Synthetic
gacccttccattagatctgagggc

SEQ ID NO: 776 - DNA, 21 bp, Artificial Sequence
  Synthetic
gtgtaccccagagagagccga

SEQ ID NO: 777 - DNA, 22 bp, Artificial Sequence
  Synthetic
cctcaggtgagagcacagcctt

SEQ ID NO: 778 - DNA, 21 bp, Artificial Sequence
  Synthetic
ggatccaaggtgccttcaccc

SEQ ID NO: 779 - DNA, 24 bp, Artificial Sequence
  Synthetic
gctggattcgatctgaggtcagct

SEQ ID NO: 780 - DNA, 24 bp, Artificial Sequence
  Synthetic
cccaggacaaagttgctttggggc

SEQ ID NO: 781 - DNA, 21 bp, Artificial Sequence
  Synthetic
gcctcgccaagaaacgcccat

SEQ ID NO: 782 - DNA, 23 bp, Artificial Sequence
  Synthetic
ccagcacaccctgataagcagga

SEQ ID NO: 783 - DNA, 24 bp, Artificial Sequence
  Synthetic
ccagggcaacaggtttaagaccca

SEQ ID NO: 784 - DNA, 21 bp, Artificial Sequence
  Synthetic
ggtctcgatgtgctccgcatg

SEQ ID NO: 785 - DNA, 21 bp, Artificial Sequence
  Synthetic
ccatcacctgcctctccctgt

SEQ ID NO: 786 - DNA, 23 bp, Artificial Sequence
  Synthetic
cttggtgtgtctcttcctgcacg

SEQ ID NO: 787 - DNA, 22 bp, Artificial Sequence
  Synthetic
ggtaaaagcaccctgagagggc

SEQ ID NO: 788 - DNA, 20 bp, Artificial Sequence
  Synthetic
cagtctccacaagtgacggg

SEQ ID NO: 789 - DNA, 21 bp, Artificial Sequence
  Synthetic
agggcagcaggtgaatgcgca

SEQ ID NO: 790 - DNA, 21 bp, Artificial Sequence
  Synthetic
ggccctggcttggccttaact

SEQ ID NO: 791 - DNA, 21 bp, Artificial Sequence
  Synthetic
gccactcccctttggtgctgt

SEQ ID NO: 792 - DNA, 22 bp, Artificial Sequence
  Synthetic
ccaggagaagaagtggcatccg

SEQ ID NO: 793 - DNA, 21 bp, Artificial Sequence
  Synthetic
cctttgcaatggagggcaggg

SEQ ID NO: 794 - DNA, 23 bp, Artificial Sequence
  Synthetic
caggcctaagccttgatagacag

SEQ ID NO: 795 - DNA, 24 bp, Artificial Sequence
  Synthetic
caagagagctactacctcggagca

SEQ ID NO: 796 - DNA, 21 bp, Artificial Sequence
  Synthetic
ctcacctgccctgggactgaa

SEQ ID NO: 797 - DNA, 21 bp, Artificial Sequence
  Synthetic
acaactcctggggggtccaga

SEQ ID NO: 798 - DNA, 22 bp, Artificial Sequence
  Synthetic
gctggctgctcatggtccatgt

SEQ ID NO: 799 - DNA, 21 bp, Artificial Sequence
  Synthetic
ccctgcctgcaatggtgagct

SEQ ID NO: 800 - DNA, 22 bp, Artificial Sequence
  Synthetic
ctgtgggtgcagcttcagcaga

SEQ ID NO: 801 - DNA, 21 bp, Artificial Sequence
  Synthetic
gcgcctggctcaagacgaaga

SEQ ID NO: 802 - DNA, 21 bp, Artificial Sequence
  Synthetic
tctgtgggcccctcaagagga

SEQ ID NO: 803 - DNA, 21 bp, Artificial Sequence
  Synthetic
cggtcttggtttcagacccgc

SEQ ID NO: 804 - DNA, 22 bp, Artificial Sequence
  Synthetic
ccgagatcacgccagtgcactt

SEQ ID NO: 805 - DNA, 21 bp, Artificial Sequence
  Synthetic
ggggaaggggaaagaggcagt

SEQ ID NO: 806 - DNA, 21 bp, Artificial Sequence
  Synthetic
gctggactgtcgcacctctga

SEQ ID NO: 807 - DNA, 21 bp, Artificial Sequence
  Synthetic
gtcccctccaccccttagact

SEQ ID NO: 808 - DNA, 23 bp, Artificial Sequence
  Synthetic
ccttcctctgtggtgtgactttc

SEQ ID NO: 809 - DNA, 22 bp, Artificial Sequence
  Synthetic
ggagcaagtggtccctgtggaa

SEQ ID NO: 810 - DNA, 21 bp, Artificial Sequence
  Synthetic
gggaatgctggcactgtctag

SEQ ID NO: 811 - DNA, 21 bp, Artificial Sequence
  Synthetic
gggcttctggcatcactggga

SEQ ID NO: 812 - DNA, 21 bp, Artificial Sequence
  Synthetic
cgctcttcccaagctcccgtt

SEQ ID NO: 813 - DNA, 23 bp, Artificial Sequence
  Synthetic
ggtgttctcacaccccaggtgtc

SEQ ID NO: 814 - DNA, 22 bp, Artificial Sequence
  Synthetic
tggcctcccagattgctgggat

SEQ ID NO: 815 - DNA, 21 bp, Artificial Sequence
  Synthetic
gcttggagctgggccatcaga

SEQ ID NO: 816 - DNA, 22 bp, Artificial Sequence
  Synthetic
ctgtacacacgcccagatggct

SEQ ID NO: 817 - DNA, 24 bp, Artificial Sequence
  Synthetic
gcttctcctgaagaccacgtttcc

SEQ ID NO: 818 - DNA, 24 bp, Artificial Sequence
  Synthetic
tgttcctacgtgggcgagaacacc

SEQ ID NO: 819 - DNA, 23 bp, Artificial Sequence
  Synthetic
ctgttttccacagtggccgaacc

SEQ ID NO: 820 - DNA, 23 bp, Artificial Sequence
  Synthetic
ctgcacacttgcacacacacagg

SEQ ID NO: 821 - DNA, 21 bp, Artificial Sequence
  Synthetic
ctccagcctgggcgactgaat

SEQ ID NO: 822 - DNA, 23 bp, Artificial Sequence
  Synthetic
ccactgataacctatgcccagga

SEQ ID NO: 823 - DNA, 30 bp, Artificial Sequence
  Synthetic
ctatggagactccttcaggtcttttttccc

SEQ ID NO: 824 - DNA, 22 bp, Artificial Sequence
  Synthetic
gagtgagaccctgtcttgggga

SEQ ID NO: 825 - DNA, 23 bp, Artificial Sequence
  Synthetic
cctatcctggtagacctagttgg

SEQ ID NO: 826 - DNA, 21 bp, Artificial Sequence
  Synthetic
tagtcccagctactcgggagg

SEQ ID NO: 827 - DNA, 30 bp, Artificial Sequence
  Synthetic
ggctctgaagaaagtacgtaaaagaccaag

SEQ ID NO: 828 - DNA, 20 bp, Artificial Sequence
  Synthetic
gggtgcgtcttcatggtctc

SEQ ID NO: 829 - DNA, 23 bp, Artificial Sequence
  Synthetic
cccaggacagctttgaatgtggc

SEQ ID NO: 830 - DNA, 22 bp, Artificial Sequence
  Synthetic
gcccatgtattggggcataacc

SEQ ID NO: 831 - DNA, 21 bp, Artificial Sequence
  Synthetic
gctctggctcttgcagaccac

SEQ ID NO: 832 - DNA, 24 bp, Artificial Sequence
  Synthetic
caagttcctggaatgctgcatgtg

SEQ ID NO: 833 - DNA, 21 bp, Artificial Sequence
  Synthetic
ccaccgtgcccggcctatttt

SEQ ID NO: 834 - DNA, 22 bp, Artificial Sequence
  Synthetic
cagcctgggatccagtgactgt

SEQ ID NO: 835 - DNA, 21 bp, Artificial Sequence
  Synthetic
ccagcctcctgacaacagagc

SEQ ID NO: 836 - DNA, 21 bp, Artificial Sequence
  Synthetic
gaaacagggagggggtgcagt

SEQ ID NO: 837 - DNA, 24 bp, Artificial Sequence
  Synthetic
gtgtgagcaactagacaaaggagg

SEQ ID NO: 838 - DNA, 30 bp, Artificial Sequence
  Synthetic
ggggagttagatataaaaagactaggggag

SEQ ID NO: 839 - DNA, 24 bp, Artificial Sequence
  Synthetic
gcctgggtaaaagagcgaaactcc

SEQ ID NO: 840 - DNA, 21 bp, Artificial Sequence
  Synthetic
tgagctgccttccgcctctgt

SEQ ID NO: 841 - DNA, 23 bp, Artificial Sequence
  Synthetic
cacctgtagtcccactcaagagc

SEQ ID NO: 842 - DNA, 30 bp, Artificial Sequence
  Synthetic
ctcttgctatatcttggaaggttatgtggc

SEQ ID NO: 843 - DNA, 22 bp, Artificial Sequence
  Synthetic
cggcttacccattcctccatgc

SEQ ID NO: 844 - DNA, 21 bp, Artificial Sequence
  Synthetic
agtggcccaagctggcaccat

SEQ ID NO: 845 - DNA, 21 bp, Artificial Sequence
  Synthetic
caggctgagggatagctggga

SEQ ID NO: 846 - DNA, 20 bp, Artificial Sequence
  Synthetic
gcctccccagagaagacaac

SEQ ID NO: 847 - DNA, 22 bp, Artificial Sequence
  Synthetic
ggaaagggcctccagaaaggac

SEQ ID NO: 848 - DNA, 20 bp, Artificial Sequence
  Synthetic
tcctcccttccctaccttcc

SEQ ID NO: 849 - DNA, 21 bp, Artificial Sequence
  Synthetic
caggaggctgacgtagcagga

SEQ ID NO: 850 - DNA, 33 bp, Artificial Sequence
  Synthetic
ggtatcagagaatcttgtatttatggcatcagg

SEQ ID NO: 851 - DNA, 23 bp, Artificial Sequence
  Synthetic
ggaaaaagccgcaggaagctgca

SEQ ID NO: 852 - DNA, 34 bp, Artificial Sequence
  Synthetic
gtggtacaaatgagtcaacattttgtcatgtctg

SEQ ID NO: 853 - DNA, 21 bp, Artificial Sequence
  Synthetic
cacggggcacctcaccaacaa

SEQ ID NO: 854 - DNA, 23 bp, Artificial Sequence
  Synthetic
ccttgccacactcattaatgccc

SEQ ID NO: 855 - DNA, 29 bp, Artificial Sequence
  Synthetic
cgttcatgtgttttcagcggctatgtttc

SEQ ID NO: 856 - DNA, 27 bp, Artificial Sequence
  Synthetic
cacaaacgttcactccacagcaacatc

SEQ ID NO: 857 - DNA, 21 bp, Artificial Sequence
  Synthetic
gcctacctgaaagttccctgg

SEQ ID NO: 858 - DNA, 24 bp, Artificial Sequence
  Synthetic
gactgggatcttaaacatcgccct

SEQ ID NO: 859 - DNA, 20 bp, Artificial Sequence
  Synthetic
ctcggagattctggttggcc

SEQ ID NO: 860 - DNA, 21 bp, Artificial Sequence
  Synthetic
cactgcattccagcctgggag

SEQ ID NO: 861 - DNA, 21 bp, Artificial Sequence
  Synthetic
gctttgggaggccatggcaga

SEQ ID NO: 862 - DNA, 22 bp, Artificial Sequence
  Synthetic
gaatgcccactctcactagtcc

SEQ ID NO: 863 - DNA, 21 bp, Artificial Sequence
  Synthetic
gctcaggggctgccatgagta

SEQ ID NO: 864 - DNA, 28 bp, Artificial Sequence
  Synthetic
cttctgcacagtcaagcttttaaccacg

SEQ ID NO: 865 - DNA, 21 bp, Artificial Sequence
  Synthetic
ggcagactagggctgcacctt

SEQ ID NO: 866 - DNA, 21 bp, Artificial Sequence
  Synthetic
gccttggcctcccaaagtgct

SEQ ID NO: 867 - DNA, 24 bp, Artificial Sequence
  Synthetic
ccattaggtatgcttcccagggag

SEQ ID NO: 868 - DNA, 24 bp, Artificial Sequence
  Synthetic
caagctccctggtgattcacatcc

SEQ ID NO: 869 - DNA, 24 bp, Artificial Sequence
  Synthetic
cccagcttgacatttccctttggc

SEQ ID NO: 870 - DNA, 23 bp, Artificial Sequence
  Synthetic
ggaggaggttggtaaaactccac

SEQ ID NO: 871 - DNA, 22 bp, Artificial Sequence
  Synthetic
ctgttgcctccttgggtacagc

SEQ ID NO: 872 - DNA, 21 bp, Artificial Sequence
  Synthetic
cttggcacacagcaggtgctc

SEQ ID NO: 873 - DNA, 21 bp, Artificial Sequence
  Synthetic
ccccacttccttcctcaccct

SEQ ID NO: 874 - DNA, 21 bp, Artificial Sequence
  Synthetic
gctctggctggagcacaggaa

SEQ ID NO: 875 - DNA, 21 bp, Artificial Sequence
  Synthetic
cctcagcctccacatctgcct

SEQ ID NO: 876 - DNA, 22 bp, Artificial Sequence
  Synthetic
gtccaaggtcacagagctggag

SEQ ID NO: 877 - DNA, 21 bp, Artificial Sequence
  Synthetic
accacagagcctcacccacca

SEQ ID NO: 878 - DNA, 21 bp, Artificial Sequence
  Synthetic
caggccctactgggacgaaca

SEQ ID NO: 879 - DNA, 23 bp, Artificial Sequence
  Synthetic
ctcttgcacaaggttgccacctc

SEQ ID NO: 880 - DNA, 21 bp, Artificial Sequence
  Synthetic
attccgggtaggcgaggaggt

SEQ ID NO: 881 - DNA, 21 bp, Artificial Sequence
  Synthetic
agggccccagtgagtgtgtgt

SEQ ID NO: 882 - DNA, 21 bp, Artificial Sequence
  Synthetic
gcccacatcagctctgcacca

SEQ ID NO: 883 - DNA, 22 bp, Artificial Sequence
  Synthetic
gctcccagccttcactgcagtt

SEQ ID NO: 884 - DNA, 21 bp, Artificial Sequence
  Synthetic
ctctcctccccagcagggtta

SEQ ID NO: 885 - DNA, 28 bp, Artificial Sequence
  Synthetic
gaaggatgtggaagcacttgaaattccc

SEQ ID NO: 886 - DNA, 21 bp, Artificial Sequence
  Synthetic
tgggcctgggactaaccagtg

SEQ ID NO: 887 - DNA, 20 bp, Artificial Sequence
  Synthetic
gccctgcatcttagcccttg

SEQ ID NO: 888 - DNA, 21 bp, Artificial Sequence
  Synthetic
gccccaacatcacccgcatct

SEQ ID NO: 889 - DNA, 23 bp, Artificial Sequence
  Synthetic
ccaaactaggccttagggcctac

SEQ ID NO: 890 - DNA, 23 bp, Artificial Sequence
  Synthetic
agagctgtgtggcgtgaacgcta

SEQ ID NO: 891 - DNA, 24 bp, Artificial Sequence
  Synthetic
caggtgctgttgaaggcggccaaa

SEQ ID NO: 892 - DNA, 21 bp, Artificial Sequence
  Synthetic
caacctcctgcctacctccca

SEQ ID NO: 893 - DNA, 30 bp, Artificial Sequence
  Synthetic
ccacacaaacaaaaggatctcctcttgagt

SEQ ID NO: 894 - DNA, 21 bp, Artificial Sequence
  Synthetic
ccctgactcgagcgattctcc

SEQ ID NO: 895 - DNA, 21 bp, Artificial Sequence
  Synthetic
cgcacgaattaggcccgagct

SEQ ID NO: 896 - DNA, 24 bp, Artificial Sequence
  Synthetic
gcttgaacccagatagcctggctc

SEQ ID NO: 897 - DNA, 21 bp, Artificial Sequence
  Synthetic
ggaaggtgctgccgcttctct

SEQ ID NO: 898 - DNA, 21 bp, Artificial Sequence
  Synthetic
gagtgaggtgcaactgctgcg

SEQ ID NO: 899 - DNA, 23 bp, Artificial Sequence
  Synthetic
gctggagtttgctgaaggtccac

SEQ ID NO: 900 - DNA, 21 bp, Artificial Sequence
  Synthetic
gtctggggaactggggtgact

SEQ ID NO: 901 - DNA, 23 bp, Artificial Sequence
  Synthetic
agatgtggctaagaccacgtggg

SEQ ID NO: 902 - DNA, 21 bp, Artificial Sequence
  Synthetic
gggatccagggccacaaagca

SEQ ID NO: 903 - DNA, 21 bp, Artificial Sequence
  Synthetic
gagccaccatgccaggtcatc

SEQ ID NO: 904 - DNA, 21 bp, Artificial Sequence
  Synthetic
ggcctcctgggctcacatgat

SEQ ID NO: 905 - DNA, 21 bp, Artificial Sequence
  Synthetic
gggttgaggggacacagcact

SEQ ID NO: 906 - DNA, 21 bp, Artificial Sequence
  Synthetic
gttcaggtggtgccaggtgct

SEQ ID NO: 907 - DNA, 23 bp, Artificial Sequence
  Synthetic
ctgtggtttcaggcatctgctgg

SEQ ID NO: 908 - DNA, 23 bp, Artificial Sequence
  Synthetic
gctggcagcagttctgatgatcc

SEQ ID NO: 909 - DNA, 21 bp, Artificial Sequence
  Synthetic
gcccgtttcagtgctactgtg

SEQ ID NO: 910 - DNA, 21 bp, Artificial Sequence
  Synthetic
atgcgatgggaggcccagagt

SEQ ID NO: 911 - DNA, 21 bp, Artificial Sequence
  Synthetic
catcttcgacaggtgcgctgg

SEQ ID NO: 912 - DNA, 24 bp, Artificial Sequence
  Synthetic
atttgctgtgcgaggccttcgcca

SEQ ID NO: 913 - DNA, 21 bp, Artificial Sequence
  Synthetic
ccctggctcagagccctcaat

SEQ ID NO: 914 - DNA, 21 bp, Artificial Sequence
  Synthetic
gctggcacatggggagacatc

SEQ ID NO: 915 - DNA, 21 bp, Artificial Sequence
  Synthetic
cctctttcggatgggcccatg

SEQ ID NO: 916 - DNA, 21 bp, Artificial Sequence
  Synthetic
caggtccgtcgcatcgtctgt

SEQ ID NO: 917 - DNA, 22 bp, Artificial Sequence
  Synthetic
ggtaagactcacccagcctgga

SEQ ID NO: 918 - DNA, 24 bp, Artificial Sequence
  Synthetic
cccacaagctcttgacttctgtcc

SEQ ID NO: 919 - DNA, 458 bp, Artificial Sequence
  Synthetic
ttacccctggatcccctccctttctactgcaagccacttaaaggaaggaaccatatctcattcctcttttcattcttagcatctgacacagtgccagcatgaaaaattcctaacaaaagtatgctgaatacattaataaccagtacttaataaaaatgtgtaaaaaccggggtgagttgactgagtacatctatgttagggcaatataagttccaccaacaagataccaagtccccaaagagtggaagaaataatcttcctgaataagaaagattacttatatctatacctgatgatacattagtggagtgtttttcagttctttttaagatacgaagaattattctcatatttaagtcaataggaattaaaacacattttcaaactggtggactgccaacagaatcaattcaattagccagtttatcgagtataccaactaggtctaccaggatagg

SEQ ID NO: 920 - DNA, 329 bp, Artificial Sequence
  Synthetic
ggtgtgaatccgggaggcagagtttgcagtgagccgagatcgtgccactgcactccagcctgggtgacagagcaagactccatctcaacaacaacaacaacaaaagtgtctccccttccctgatggaatctgctgccagggagaacccacagtcagggaagagggtgtgggatgctgcttctctctttactttttttttttttttttgatgcagagtcttgctctgtggcccaggctggaatgcagtggcacaatctcggctcactacaagctctgcctcccagattcatgccattcttctgcctcagcctcccgagtagctgggacta

SEQ ID NO: 921 - DNA, 368 bp, Artificial Sequence
  Synthetic
gctactggggagcctgaagtgggaggaatgcttggacctgagagttggaggctgcagtgagccatgactgtgtcactgcactcaacttaggtgacagagtgagaccctgtctcaaaaaaaaaaaaaaaaagtaataataacagttgtctctaggtagatgaaattacaagtttgtatgtgcttttctgaaatgaacagaaagggaaagaaaatctcaaaccaactatacattttaaagagaggtaaagaaagaagaaataccaaggacaggtaggaaagaaaggctgtggacataatattccttactgctgagatgaaaactgaattgtaacatatccgttagtttcagagaccatgaagacgcaccc

SEQ ID NO: 922 - DNA, 547 bp, Artificial Sequence
  Synthetic
ggctaggggaactcgatgtctttcgaaaatatagacgctagccctccttgagacattataattcagttattcatgtacagttggctaaaaacacataccaatctttttgcttaagaaccacacaagggaaaaaatgtggaaatttagtaaaactcaattttaagtgtccatgaatgacagagcacattcacactcattcatttacatattttctatgcctgttttttatgctaaatctgtagagtttagtaatggcaaaagataccgtatggtccacaaggcctaaaatagctactatctgtaccttacagaaaaaaaaaaagagctgactctttttctgacctctggtctaagtcaagtctgtcccacaagacacaaggtacaatgctttttccacatgaggtcaggaagaatctcaaaactacagagtcaggcctcacattatcaataggaccatcctagccttctgcaagctttcaggctttagtcaaagctggcacattttcagtgaatccttagtccactggtggtctgcaagagccagagc

SEQ ID NO: 923 - DNA, 532 bp, Artificial Sequence
  Synthetic
gtgatgggctttgttcccaactcttttacatctccctaccccttcaacctttggcctttcagcccttctttctctcttccatattctttggtttgtatgtggtttctcagttaatacatagctaatagctcttatttttcttatgtttttaaccgcttaggtctatttggatgtaagggtgaaaattcatttgatggaaatacttgtgtatatttaaagacccaattgctcctctggagcttgtactttcaagaatgattaatctgtgtaataaactggttactacagtcattacatataattttgtgtgaataggctttttcatttttaagaagtttgtctagctgagattagtggtggattttctcccacttctgaaatgttcatttatactggttgcattttaagatcatgaaacaattccagttacattgtaaaaaggatatcttacgagtaattttattgaacaagttagaggcataagcttaagagcatttccatgaaacaacacatgcagcattccaggaacttg

SEQ ID NO: 924 - DNA, 368 bp, Artificial Sequence
  Synthetic
caagatagggccttgctgtgttgcccaggctggagtgcagtggcacaatcacggctcactgcagcctcgacttcactggctcaagcaatccttctacctcagcctcccaagtggctgggactccaggcatgcaccaccacacctggctaatttttttttttttttttgcagagatagggttaattgagcattttttcctcctttcttaacatatcagttataatcattttttaaagttttttttagaggttgccctagaatttgcagtgtacatttagagctaatccaagtcttctttcaaataacaccatgccacttcatgggtaatgctagtgctttataataataaaataggccgggcacggtgg

SEQ ID NO: 925 - DNA, 437 bp, Artificial Sequence
  Synthetic
cctgggatgggaatcagaactgcccagtaaacgcattaagcacacctgcccttcttcagttggtacagtgattggtgccctatttaacttttccttttccctcacaggtcttctggagacttctgagcaacctgctatacgtgtcctgtcgttggtgatgtttccatgtctctgtgtgatctgcaaacccctctgctaaaaaagaattccgattcgcattcttaccactggggctgcacctgctccacctgtctttaccttgcgcacacactgtttggggaagatgctttttctgatactttctgaatggaaaggcatcataagaaggacatatttgtgaagtgcttgaaagtcctctcatactttccaacgcagaaggactaaagtctttgtcaaagttaaggtaaaatacatcacagtcactggatcccaggctg

SEQ ID NO: 926 - DNA, 526 bp, Artificial Sequence
  Synthetic
caggtattatgttaggccatggggatacaaagatgattaaaaccacttcctcccctcaaagaattctcatgatggcagaaatggggcatatgcaaacaagtagtcaaacaagcaattccaaacatataagagctatgatagatgaacattcagagtgctttaaaaccactgagaaaggaacaatcaatctgtctcctttccatagagtagacatatgagctgagacttgacagataattaggagttcactggtaggcatgggacactgtagaaagaactctgaaaaagacattccagttatagaaaatgtagagacagggggaataaaaacacatggaaaggagattaaaattgctaacacttaggttttcatcatcaatcttcccctcagaattactattgtgatcataaaatattattactattagaagtagtaatagtagtagcaaggcttacatttattcatcatctactatgtacaaagcattttttttgacagagtcttgctctgttgtcaggaggctgg

SEQ ID NO: 927 - DNA, 395 bp, Artificial Sequence
  Synthetic
cgttctcatggacctgcccagttattttggttctaagctagaatcaatctgctagatggtttaccatggcaacacaaggtgaagcagaaaccctgggacaggagagtcaagcgctgtggccaggacacctaaggcttagagggttttccagtagaacctttccatatcttcctttgtaaaagctaagggtaggagaggtgtgtgggagaaccacagccagcaacaaagggggtcctttttgctaaaagagactcagccagttgctttgtcaggacaagagggaaggagagtagggatgggctagtaaagacaaacttcacactgactgtgaaactcagactcatccttgtctagtccactgtggctaaacgaacactgcaccccctccctgtttc

SEQ ID NO: 928 - DNA, 477 bp, Artificial Sequence
  Synthetic
ctatcagtgaaatctttgcccattctgtttgcaaatacagtttttgtgctctttctagaagttttatatttttgtagtttacattgatttatataatttgctgcaatttaatttttcttgtgatgtgagaaaaacataaagtttccaccccttatcctaaattttaaagttgtttgagcaccatttgttgaaaaaacaatccttcccccactaggatctttgttgaaaatcaattgataaaatatatgtatatttatttctggtttgtatattttgttccattgatagagatatttatccttctgtctttaattcaccttcatttgaagagtattttttatgaatatagaattttagattgatttactttttctttcagaatttaaatatgccactcaattgtcttctggttgcataaattctgacaaaaactcaatgattattttacaatttcctcctttgtctagttgctcacac

SEQ ID NO: 929 - DNA, 440 bp, Artificial Sequence
  Synthetic
gggcttccctttcttccactagattaagttcagaagccactcatttatatttaaaatatcatattatgtaaaatgttaatccaataacctaagtttgaaatattatttttttcctctcttgcactttgttaatatagatgtttcattgttctgtagggcctctatcttcccttgagctgtttttgagtaacttgaatgctttccataaaacatcatttttactatcactagaaatttaatctcaagctatatttgtgtttttctcagtgtaataagccacttcattgctaaaacaaactttgtattattgaaaatttccaacaggtaaagagaacagtatataaacctccatgaatgaattatgcagattaaacagttatcaacatttttctcattattgttccatttaactcccctagtctttttatatctaactcccc

SEQ ID NO: 930 - DNA, 454 bp, Artificial Sequence
  Synthetic
cccctctcccaaaaggagagctttatgatgacatgtgatgaagaattttatgctgttctgctaaaatcacatttaccatttcgcatattgggcttcaatttttaatttactcgttttaataagcctcattacttccaaggttatttatacagtgtttaactcctactgggtgtttctttttctgagtcttttttagcttttaagtaatggctgtgattatataattaaagcaaactacagcagattacattaagaagttcactttttttggaagaaggaagtttgctctttgttcactttcatattattcatttttcataatttaatattaccaaagatagtgcataaatattataattagcatatttgttgtttttcttgaatggatattgtgatttacctttgtttttgttttttgtttttttgagacggagtttcgctcttttacccaggc

SEQ ID NO: 931 - DNA, 520 bp, Artificial Sequence
  Synthetic
gcaagtgatacaaccccaagccactaacatatatggcaagaaggagaagcagaagaaaaccagggaaaagaaaaagcagatactcattgccctaagaaaaataattttgtaatcacaaaattaaattactctgctgtgaatcccagtgaagaaatggccttgttggaatggtttgatgtgctctcacaggcatctcaaatgggaaaacatacccacaggaaaaatttggaaggcaaacagtaaaaactttcacattaatctggaaaacaaaagagtggccatttataccttatgcctaactctaaaaaactcttaagtgctttgcagtttatttttggaaaagagagtaggagaaagaagaaagtggggcagaataacagggagagagggaaagaaacagattttttttttccttttggtccaaaagatgttaaaaagaatgttactctaagggaagagtggtattttctacctcattggtgaatcttgggctagtcctacagaggcggaaggcagctca

SEQ ID NO: 932 - DNA, 421 bp, Artificial Sequence
  Synthetic
ccagccttcagtttgccaaggggttggcattaatcaaatcgttttctgtaattcctgccatggagccttagtttccttttataatctggttcttcggccttcatgcaggttcaataaaagctacctgaaatctttctaataaatttcatattttctagatagagcctgtttctgttgcctgtagccaaggaaccctagttgattttttttctttaatttacacaacattgttattgaatagtttctgtctgccaggcaatgtactaaacgctaaactctttacctgcattatcctatgcaatttttttttgagataggttctgttgcccaggctggagtgcagtggtatgatcaaatgcagcttctgtttctgggcttaagcaatcctcccacctcaggctcttgagtgggactacaggtg

SEQ ID NO: 933 - DNA, 463 bp, Artificial Sequence
  Synthetic
gcacaccagaggagagctgcttgcttagtaaaaattatgacattcacagcaaaacagcaatcctctaagatcattttttgtgtccatagagatgaagctatggagttggtgtgcatgtgacttgtgaatcaccagaaaatcttcagtgttttaatttcaaaaacaccttgactctctctggggcaaggggcgtgtcactgatcgtctctgtgccttaatttatttatcttaagcagaacaatttttaaataactaccttctttaccacttagagacatgtgaggtcctgtcaagtatttttcagaaagatactaattaagcatgcattttacggttactaatttagtacggtaaatggattatacttacaataactaggaagggctcaaagtatttatacaaaatcagtcaaaatgggataaaatgtcaagtagccacataaccttccaagatatagcaagag

SEQ ID NO: 934 - DNA, 434 bp, Artificial Sequence
  Synthetic
cccagtcttgggcagccctttatagcagtgtgagaacagactaatacaccattcttaccactttctaacagttcttgttttcactttctgtatgacttttcaacccattttcccatctacttctaccttcaccttttcacttatgaattcattcttcagtctttttcagatacgaagtcttcttacctttctcttatcaatttcatttttttatattccctgatgtcttacatgtacttttgtgagcatatttgtgtgtgttcatatttatatcgtagtgtctgtatatattcataaatatgtctgcatatgtacatttttatatctatctgtgtgcattatagactgtatatgtatctttcggttgtggctaaaactgagcaagaagtttatttcattagttacagcttctgcatggaggaatgggtaagccg

SEQ ID NO: 935 - DNA, 385 bp, Artificial Sequence
  Synthetic
gcatttaggacagagagcgaagcatatgtaagggccccaaggcaggtagaagcatggcagccaggggggactgagggaaagacattgttgcttttgaacacagtgaactaaaaaaaagtgtggaatactagaggcaaaaaaggtaggtaaagactggatcatacagttataaagattttcccctaaaaacaaatacaagctactgaagtattttaagttgagatggggttgaaggaccagatcaagtttatgttaaaaaaaaaaaaaaccactctggctgaagtatggatatcagatttgaggggaggacagtgtgaatgtgagtagatcaattaggagttcgttatagtagttgtgccaagagatggtgccagcttgggccact

SEQ ID NO: 936 - DNA, 531 bp, Artificial Sequence
  Synthetic
ggcccttgctatgccagggaagtttaaaaatcttgagaggagtaagtctgttataacagatattctttcactcttccatataattgccctccatttactgcttcctctttcctttctcttctcttttcccttttatctttttcaatgttttctcataactttttcttttcctttccattctactggcattacatcttagctcctgtggtgggtatgcagtatttgtttcagtttaaactacatgcaaagcatttcaaaaaatactgtgatgaaacatactgcttgataatttaattttgttctaaaaatagttattatttggggacattttaaataaagctagtcctagtgctaatttctttatatttgtgaaataactttgataagaatatcttatttttaataatacactctaacaaataaacactttaatgaagaaaaataataggttaattgatgtcccaaggcttcaaaattacttagtcactacatatgaaatagaacttagattcccagctatccctcagcctg

SEQ ID NO: 937 - DNA, 395 bp, Artificial Sequence
  Synthetic
caccattctccctgcctcagcttcccgagtagctgggactacaggcacccgccaccatgcccagctaattttttgtatttttagtagagacagggattcaccatgttagccaggttggtctcgatctcctgatcttgtgatccgcccgcctcggcctcccaaagtgctaggattacaggcgtgagccgccgcgtctggccccaaatgtgaatttttattgcaactatcctttccctgttccatcattcggagatttttttttagaatataaattgctggtccataaaaacctctctcagacctaagggaagatactgcatctgggccagggatcttgaactttgagctgattaaaatgattggatgaattgctaggttgtcttctctggggaggc

SEQ ID NO: 938 - DNA, 343 bp, Artificial Sequence
  Synthetic
caggaggctgaggtgggtgaatcatttcagcccgggagatcaagaatgcagtgagatacgatcacacactgcactccagtctgggcaacagagcaaggccctgtctcaaaaaaacaaaacaaataaaaaacaaaaatagtgggtgaacagagtagtaaaccaatggccagtgcaagcttgccacataggagatgaagaaggaccacccactgccccataattcagaactagggccaggggttagagccctctccacagtctactggacataacctaagcaatgactgcagggcacggaagatggcatagaggatgtgttttgtcctttctggaggccctttcc

SEQ ID NO: 939 - DNA, 373 bp, Artificial Sequence
  Synthetic
gctagcatttgcactcctgggcaattatcccaaagaaatgaaaacttaggtccacacaaaaacttatacacaaatgttcatagtagtattattagaatagctaaaaattaaaaacaatatgcatgtccttcaacaggtgaatacagtggtatattcataatatgaaacattatttatactgaaaagaatgaactattgatacatacaacaaaactgatggatctcaagggcattatggcacatgaaaaaagccaatttcaaagggttatatactgcaagattccagttagaaaacattctcaaaatgacaaaattgaacacagattagtggttgctaggggttaaggatgtgaggaaggtagggaagggagga

SEQ ID NO: 940 - DNA, 438 bp, Artificial Sequence
  Synthetic
cacctgtcaccacgcctagctaattttttttttttaaagatcatactgcttctgtccctttttttttattattattatactttaagttctagggtacatgtgcacaatgtgcaggtttgttacatatgtatacatgtgccatgttggtgtacccattaactcgtcatttactttaggtatttctcataatgctatccctcccccctccccctaattttttgtatttttactagagatggggtttcaccatgttggccaggctggtcttgaactcctgacctcaagtgatccacctgtcttggcctccgaatttttttgttgtgtttttttgagacagggtctcattctgttgcccagactggagtgcggtggtgcaatcatggctcactgcagccttgacttcctgggctccagggatcctgctacgtcagcctcctg

SEQ ID NO: 941 - DNA, 467 bp, Artificial Sequence
  Synthetic
gtacagagtaacctataagtgtgacatacttttgctttcagtagtttcatgtaaagaaaaaaacttgaaaatagattactattaacctgaggacccatgggaataacagacactggggaggtagggtggggagcgggaacaagagctgaaaaactacctactgtggactctgctcactacctgggtgacaggatcatccataccctaaacctcaacgtcacacagtacacccagctaacaaacctgcccatgtgttccctgaatctaaaaaagaatcaaaataattgtttaaaaaaagaaaaagacaatagtattacccatgggacaaaatttgtactattagcaagaatcatttgtgtctcatttagaaacaatttgacttttgttccattgtttaaactttgacaaaaatggttttgaatagatctttataacctgatgccataaatacaagattctctgatacc

SEQ ID NO: 942 - DNA, 475 bp, Artificial Sequence
  Synthetic
ggggattcagagattgttaaagaacacaaggtaaacacaatcatttgaaatttaagatatgtttttaaatttcaagaataagtttatttcagacatttctttcactttatcaaatctcttaatcaaaaatgaaaccccagataccatatttatgttattttgaggttgtgttaataaatataggtgttctttttatgttaagtaggaatccttagcaacttaactagtagtgcttgtaaacagacaacaacaacaaatcctaaaaaccagacatcagtgaaaacaaaccaacaaccaaaaattactatctgtacctttaaatttgtaagcattttttagagtttgtttgataaacttaggttggttttaaaatttagctcagtgactcagttgcagctgttccaaataattggtcatgagctttttatactagctggcttaatctaacagagtgcagcttcctgcggctttttcc

SEQ ID NO: 943 - DNA, 409 bp, Artificial Sequence
  Synthetic
gcaccttgtctatttcttagagttgttgagcagaagagtctgtataggtgacagaaagaggactttaaaaaaatgtataaaatgaatttgaagagtgtgataatatgtaaagaaacttataatcaagagacataaaaataaaaagtagtcaaaaattgagaagatattttagcctttatgtccttacccttagagtaagatatctttcattatacctatctatgcttctctatttacctatgtatatatacacattcatatactttttcagttgtatcatgtaagttcatatggtctttctgaaataaaaagccaaaaccaaacagtagaacataataattgactttatgctgtttttctctgaatgacaatatacagacatgacaaaatgttgactcatttgtaccac

SEQ ID NO: 944 - DNA, 342 bp, Artificial Sequence
  Synthetic
agtttgcgtctgagcctggccctccagccatggcccagcccagcccagctctgctccaacgccgtccccagccctaccccctcttcctccttcccatcatcctattttctttaatgagccagctctttgataactgcagtgtgttttttaggaactaaacaaactgaagctgcagggtattcttttttttaacaaaagagctcattgaataagcaatgggtttttctgcaactatttttaaagatggagctgcaggctaggctgtgaggaaaatcacagagagtgctctcctcaaggtcagggcattgagggaaaaatccattgttggtgaggtgccccgtg

SEQ ID NO: 945 - DNA, 423 bp, Artificial Sequence
  Synthetic
ctgaatggtgagggctcccttaaataatgtaacagtattgttattcagttcaaatgtaatttaattcagctacaatatgaattaagtagttttggggaactagcctggaaactaaccattgacaaaactgttcagattggaacaaaattctacagcatttttgaacttttaagggtcaacatttgaaagtttgatgctaaatgttgactttcacaaatgagagaaaaatgcaagaatatccagggtaagtattgggaattagctacaaatgactttccctttccctgaaagataacaatgcatagttttgtatagagcccactttacagagtatgatagtgaagatatgtttatcttgctgctttcattgcagctttaaaggaccataactaattttaaggggcattaatgagtgtggcaagg

SEQ ID NO: 946 - DNA, 490 bp, Artificial Sequence
  Synthetic
gtctcccaggggaagaatcatagaacagtggggaagaaatgcattattcaataaatggtgctggaaagatagtttagcaatttggaaaaaaaatcaatttcaagtctcatcttactgcacactaaaataaattttaatggactaaagaaccaaaatgatataaaaaagactataaaagcacaaaaaaactctactggggaatacttggtaaggttaaaagagttgaacaaaatcgtaaaagaaaagttacaaattttattaaataacatttaaaatttctgtctgtagctcttcctgtgtctactcaacaaaaatcaaaatagttatgaaagagtataaacactaccacaattggaagacagaatagttctattaactctatgcatttgtcaaaactcatagaactgtaaaagtaaaaactttacataagctaaaaaataaatcacaaaaaggatataaaagaaacatagccgctgaaaacacatgaacg

SEQ ID NO: 947 - DNA, 452 bp, Artificial Sequence
  Synthetic
caggtccacaaacccctcccatggctctaggggagaatccttccttgccttttccagcttctagcaactcctgggatactttagcttgtcactgcataactccaacctttgcctctgtcttcaccatatttctatatgtaaaggctttttttggatttagaagacacctgaatccacgatgatctcatctcaatccttatcttaaatctgctatgatcctatttccaagtaaggttacattctgaagttccggtggccaggtatcttgataggacactattcaacccactgaaagtccttatttacccctcatgtattgttattctccctgcttaaattttaggatcagtaactactcatccagatgttgactctcatgttctaattgaatttaaacaaaaagttactactacaatgaatgttttgatgttgctgtggagtgaacgtttgtg

SEQ ID NO: 948 - DNA, 480 bp, Artificial Sequence
  Synthetic
tcacccagggtcacacggctagttagtcacaaagtgaatctagaacacaaagtctcctttcctccaatccagagcactttccactacatcacaagggaagagcaaaaagaaaaaataacatctaattttaccagaaaataaaatacaggcaggcctgaaccacagccagagttaaatgtggagcatacctacctccaaacccagctggaacctcaaaggttagtatatattttagactcttcaaaaatattttaatcacatgtgaatttgaggaaagctctgattttaaaaactcaaaaacactcagtagtcacacagcataaagttatgacagtattagctggataataaatttgtagaccacaaactgtccatccagacaatttacactttaaaaacatccaaccttcttagaattagtttgtaagtcaggcaaagaggacagatttttctatattaccagggaactttcaggtaggc

SEQ ID NO: 949 - DNA, 444 bp, Artificial Sequence
  Synthetic
ggagggggctgtctttctggttcactagctgtgtcttcctcatgtggtggaaggggtaaggcagccctctggggcctcttttataagacactatcctcatgatctaaccacttcctaaagaccccacctcctaataccatctttaccttggagattaggatttcaacatatgaatttttttcagaatgcaaatattgaaaccatagcacaatcccacagatagacaggagatagatacctcaactaactggtgttgaccattatttgattggtccatactgtaggaccactccatactataggactcttgctttgtactgtaattggactcttcaggaagaacagtaacaattattttaaagattaaagggtgtctgtttatttagtatgttagttacaatgcactgtctgtatgtatttagggcgatgtttaagatcccagtc

SEQ ID NO: 950 - DNA, 457 bp, Artificial Sequence
  Synthetic
ctcagccatgtcaagcaaatcattcaagcaaaatctagctgaaaagtctgaaacattcttaaaagctttgttgttattctaagtcagccaaaatcctggtatccctcttccagataaagagctcccactgagaattgtagtctatggattttaccttgactgcaattgtctttccttcctatctgcttgttgtttgtaggttctttttttgtttttctcaaatgctagtgatattttgtttacagattctaaaagcaatgcaaaattctgttggctttattttcagcagagttaaaactgatttcatcatattatcagtatgtcatctttatatttatgactgacatctgctattccagtgtttattggagacttgtgaatgaatctgtccaggacacttgtcagttcctacctgaatctcttacctattgagatttggccaaccagaatctccgag

SEQ ID NO: 951 - DNA, 451 bp, Artificial Sequence
  Synthetic
atgttccaggcgccacgtagaaaagtaaaaacaaaaaacaaaaaaggtgaacttaattttaatactgtattttatttaaaccaacctatccaaaatctatcattctagcatataaccaacataaaaactatccttgagatattttacatactataatatactatgtagtatatataatatactatatactattttacatactacagtatactgtagttgttcatagtatatcttcaaaatcttgttctttacatttacagacgatcttaatcagacactaaagtttcaaggtctaaggtaaatatagtcgtagcaaatcaataaagtaaacttgatatgaaattattttttactgtatcagtttggtttttttgttgtggtggtttgtttgtttgtttgtttgtttgtttgagacagagtcttgctctgtctcccaggctggaatgcagtg

SEQ ID NO: 952 - DNA, 356 bp, Artificial Sequence
  Synthetic
caacacaattcagccatgttctttgtccctttataataaggattgcctttcctcaggtttctcataacatgttcatttccatctgaggcctcaacagaagcacctttaatgttattatctttaccaacagtctcctcaagacaatggagattttttttctataaagtgcctcaaaacccttccagcctttatccataattcaaatccaaaaccacatccacatttttaggtatttgttataggatctgccatttaaaaatattattattatttttgtatagacaagttcttactatgcttcctaggctggtctcaaacttctggtctcaagcaattctgccatggcctcccaaagc

SEQ ID NO: 953 - DNA, 452 bp, Artificial Sequence
  Synthetic
tagggggcacctgtgccagtttgttacctgggtacattgcatcatgctgaagtttttgagatacaatagatcctatcatccaggttgtgagtatagtgctcagtagttttccaccccttgacaccctctttccctctttctcctagtagtctgcagtgtctatttttgccatctttgtgttcatgagtaaccccaatgtttaaaacctacttataagtgagaagatgcagtatttggttttctgttcctgcattaatttgcttaggataatggctccagtcctgggagcattttggcggagtctttagggtttattaggtatagtattatatcatccacaaagatggtttgaactcttttcctatttgaatgttttttatttcttgttatctgatggttgtagctagcagttccatcactatgttgaataggactagtgagagtgggcattc

SEQ ID NO: 954 - DNA, 395 bp, Artificial Sequence
  Synthetic
ggccatccctctactcctggtctttaaagaatacaccacacaacattgattttgttctcatattaatcactcagccttcacaggaacactactggatgtgatctctcaaaaagactcagccctagctatcaactcaagtgctgtcagtagtatccattggacccatagaaaaatatagacatgctgttccagcaagtctctggaaatgtatgaaactccttttgctggtctctctgctttcctcgctgttttgggctgtttcaaccatgcttggcccttcatgttttgcaaacgataacaataactaggcatcaatctctttacttaccaaatctaggacacataggtcaaattctccctatatgctctcactctactcatggcagcccctgagc

SEQ ID NO: 955 - DNA, 428 bp, Artificial Sequence
  Synthetic
gaagatcagtcacttggcctctggagattcagaacataggttaagcaatttgagacgcataggaagagaacttggagaataccaatattttacagaataggcatagagagggaaaaatcattaaggaaactaataaaaactactctacaaggtaagaaacaaattatagaaaaagaatgtagtatcatagaaggcattagaaaagagcttcaagaaggaagcactggttagcagtaccagatatccaagaaatctagtaagatgacaactgagaagccaattgcatttggctatgtggaggttactgacatttatgaaggcagttaagttgagtgggaagggcagattgtagtaggctgaggagaattagggaatgaagaagtaaagacaatataaaccacgtggttaaaagcttgactgtgcagaag

SEQ ID NO: 956 - DNA, 368 bp, Artificial Sequence
  Synthetic
gggcagaatggtcacccagcacttgaagatctcatcacacagatagcaaagaccccatctggatgagttgatagataacagaggagctgtctttgacctttgtctcaaaacaactctgtatttatttcctaggtaaaaacataagtgtcgccctcctgttctcacccatttctactttaggctagacagaaagttcttaccttctttgctgggttttttatttaccatgagacacaacaaggcagaaatctctttaacatgcaggcgtgatccccatcctgtcttcagagttggctgagggatcccaggctgatctgatttctttcagacctacagagcccataaagaaggtgcagccctagtctgcc

SEQ ID NO: 957 - DNA, 399 bp, Artificial Sequence
  Synthetic
gtgcattcaggaagcttctgtttgaccattcatgtgtttacagatgttaaaggcatgggtaattaaagttagcaataccaaaatttctggatttgcacaagttatgaaaatgtcattaaattcttgataagggtgttggttgcagagtgtttctcagaaaatatctgtctaggagagaaggaatgaaaaatttttaataattttatttcaaaataaaatatacataaagttcccagagcagctgggctcaaatattaattccttccttcctaccaagttgcctccattctatatctatcattaatagacagctgacctaataattttagtggtttcaaattatataggccgggtgtggtggctcacgcctttaatcccagcactttgggaggccaaggc

SEQ ID NO: 958 - DNA, 406 bp, Artificial Sequence
  Synthetic
gcaggaagtgccaggacattgaacagagctctcaagtgaagctattgtaaaatttcacttccttcctcctttggctttctaactcccatgctctcccagaatgagagctctggaagattttgacttcttccttctctctttcccttcacccctacatcaagattttgtttcagaaaatctaatactttcatctctagactattatcaaaaattccatgtcagtatagagctactaacacatgttacccatttccagacatttagattaactctatataataaactaagttttttgatcagcaccttctcaattcttctgttatgaagttttggttctggtgttttgtttgtttgtttaggttggtgtcctttcttcattattctccctgggaagcatacctaatgg

SEQ ID NO: 959 - DNA, 418 bp, Artificial Sequence
  Synthetic
gctggaggtgatggccaaggttctgttcttcactctcttagaagtgatggtgtcactctgggtaagtccctcaccctctgagcctcatttgtaaaatgtgaaaatcaagagaggccctggtccttaaggatcttaaggactttactaatgccttttcctcctctggtcacaacattgcagagacttgtgctgtcaaggatactgactagttaagattcttactgctgaagctgctttggggaaggacacatttcctgggagagcatgtcaagctgaaggtcatcataccaggaaaaacaggagaaattatcatatcagcaataggaaggcaaagtaagggtgtagggtgtagcctagatattgctgccaaaaaagacaggcctccagtgcctgtggatgtgaatcaccagggagcttg

SEQ ID NO: 960 - DNA, 427 bp, Artificial Sequence
  Synthetic
cccagtactcccacactctgccttcttgcaaagtagatggatcacttcaatccatcctcacttcctggacctcgctacctcccacttagactactgattgcaacagtctcttcattcactcttcccatcctacactctcgacccctcaaatctattctccaccctgcagagtgtttttcctaactgtattagtctcctatttaaaatccttctgtggcttccacttcaaccatcaggctcttctaagttcattttgatagctatgggaagcctactttgacttcattctcatttcttctctaggttcccttctggtagcttcccaccctgagcctacattcaccatgtctgttgtatagactttttgaaaggcaaatgaatctcaggaccccaaaatcactaagccaaagggaaatgtcaagctggg

SEQ ID NO: 961 - DNA, 544 bp, Artificial Sequence
  Synthetic
gtccaggacaaagctcagtagcctttcgtaagcagcagccaacaatgcaagaaaagcaagtgaatgaggtaatggatttcttttcccttattccactagagagcagtgttcttttgtacaaatcaggtaggttgtttgctgcaaagaacctgtagagaaaatctacattaggagaggttttattagcaggagaaaggtctcttgcataaaactctgcattctgaacaaaaggtgaagacagttttttccagccaacttgctcttattgatgtaggtatacctctgataccttattttcatatggaaaagtgttggttattcaaaaatataacatgaaaactatagattacattctatagtaaatttttcagatggcaatcctttgccaaaacagatctgtcagtaaccaactattagttatctttatgggtaatacaaaaatattaataatttttttaacaaaaactcctaaacaattcaggagcaaaagaaagagtgaagagaaggaatttatgtgtgttgtggagttttaccaacctcctcc

SEQ ID NO: 962 - DNA, 372 bp, Artificial Sequence
  Synthetic
cagctggccaagcagggatcacgtccctctgccttggccactccaggccacctgcagagggggcagccctgtcagtgatggagggggagacagcctgtgttattcacgccggaagtccatggcattctcagagagctcttccccgtacctccccagaacactgagaatggatgaatcagtcccggctcatcagagcctttcatgctaaaccagcccaaatgactgatttagaaactgcgtggtcttgttctttgagtggatttctgaggcacactccagagcaggcccaggtcttcattatctccatgcacaccctttgattaagcatctgtgaccacacagcactgtgtgctgtacccaaggaggcaacag

SEQ ID NO: 963 - DNA, 379 bp, Artificial Sequence
  Synthetic
gtgtaccccagagagagccgagcctctctttgcagaggcggtttcccttctgtctgcctcgatcactgcactggctgggagggctttgcgtggtttacaccatgcaacacgttttccatctcagcatcttatgcgcttaagcagcggttgggcgttagccctgctcaggcctccaatgctaacaaaaacagggagagcctccattcaccccccagggcctcgtgtgcagggacaggcagccccgacgcactgctgtcggccacctcctgggttagaaactgcaaggcctgatgtggggccttcccagcttccagggggctatgtccttatcctgagaccccacagccaggaccgcaacaggcagatgtggaggctgagg

SEQ ID NO: 964 - DNA, 350 bp, Artificial Sequence
  Synthetic
cctcaggtgagagcacagccttggggacacagcctggggccttgtggcatgccccagcaggtgctggggtcgggggtgagctggaatctggggtaggtacctcagccggggtgtcatagtccctgaaaggagggaggctctcctgtgtgatggggagatgaaagcctaggcgacggggtttgagggatttcagggaccgagacaaaggggatgagggaggggaggagacctgcaacaatctagaactacctcctgcccttcccccattgtggagattacacagactccagagtcagcacagctgggtacaaattcttaacactctgctctccagctctgtgaccttggac

SEQ ID NO: 965 - DNA, 333 bp, Artificial Sequence
  Synthetic
ggatccaaggtgccttcaccctgcggcctgctctatgagggcctgcgtcgcacatcagctgttggtatcctcacctcgctgagccgttcctccgagtgtgctctgtggcttgcaccaggcctagctgggccttgtgtctggtctcatccagcgtcttctgattgtggggaatgaggcagaggtctccccacctgggctgtccgtgtggcgaaagccttccggggggagggagaggaagtgcctctacaagggcctagagtcgtcctgtggcactgagggctctggcagctgcacacaggttgataatgtcactggtgggtgaggctctgtggt

SEQ ID NO: 966 - DNA, 442 bp, Artificial Sequence
  Synthetic
ggtctcgatgtgctccgcatgagtggcatccgtacctggaagccacttgctggttactctgaggtaatacagacaacagctccacccgggtggcgcatgggcaccttgctcaccccggaatccctcctttgcctggacagcctatgcaggtaagatgccttcatttcattcccatatagctcattcaagaaatcacaatggcaacctcaactctcttgttccctcacatcccattactcaggaaagctgtcaattccagcttcaaagctctttttaaaaattctcttccccatgtgtccaagccatacttgcagcttgtgtccctatttctagtctcttcctctaccctaaccattctttaagctgtggccaaagggacctttcaaaatgtagctctgccatgaaggaaatgcaaattaaaactgcagtgaaggctgggagc

SEQ ID NO: 967 - DNA, 408 bp, Artificial Sequence
  Synthetic
ccatcacctgcctctccctgtctattgtgctattcaatgaaacatcatagagaggatagatgtgattcagcatctggcatatacctgctgtagatgctgtagaacagattctctgcaagtgcttgttaatgtaagttctctccgcagaacctcattctcttgagacagcaatgctgagaaagcaaatctgggactggggctgtgatatattcaaatttgacagcctcatcctcctcctaggtgattctgatgtcagtggtcctgaggccatattttcaggaatactgccttaaaagtcattattatccaaccaacgaattcttactctgtaggcaactaaaggttgacccttcccaagggtcacattttaatggtgtgtttcacttttaaccctgctggggaggagag

SEQ ID NO: 968 - DNA, 474 bp, Artificial Sequence
  Synthetic
cttggtgtgtctcttcctgcacgtaaaatttcatagagaaatataacagcctccctcatcttcctgtctgattaatttaagaatgccacaattttcttggaatagcctcttggtgatgtcctagcctcttcttatgagggtgagttgtcaggaactaggatttcaccgaggccttagggtgtgaatgaggaggagagtctgctggaaatgtttctaataaagaaggtaagcaaaggtcagtgacttctctgtagtcaccaacatgacctgtagcctacttattaatgtggttcacaatatttaagaaatgagtcatatatgatgaggaaacccttgttcttcaagagttaccaaagtggtctggttttccactattttctattgccttgtgttaagagtttaagatagcataatactgtcagagatgtatttgcatgtatcttttagggaatttcaagtgcttccacatccttc

SEQ ID NO: 969 - DNA, 363 bp, Artificial Sequence
  Synthetic
ggtaaaagcaccctgagagggcatggaaaaacaccaggtgagttggcccctaagctaccaggggcattagttccagacatctcctgctgaacatggaggcaggtggggtccctgatttcacccagcctggctgtgatgcacttctgagggagtcctgtgtgaagtgcacagggaaaccctgctctctcaggaagagtgaggtatggtatggtctgaatgaggggagcagggaaagctgccagactcaggctcccaaggaaaagttaggacccagtggggagtagggaccttgagaaatgagactggtcagaggctatgttcacatcccaggcaatgtggggccactggttagtcccaggccca

SEQ ID NO: 970 - DNA, 370 bp, Artificial Sequence
  Synthetic
cagtctccacaagtgacgggaaattggaaccatgcacaagacaccaaaagcagtggacagtccaccagcaaaaaggtagtgctcagcaatgtggctttctctacacaggggatggctcagcgacgtggctgtctttacatagggggtggctcagcggcgtgactgtctctacacaggggatggctcagcgatgtaactgtctacacagggggtgggcgtttccttctcggagtattagcgcttagttgactggagtattagagcagtgtggttcacaaataactcaaaattgcagttaaaataaagtgaactaaaatattcaaaaatagatttagtgtaaagtttatatgcaagggctaagatgcagggc

SEQ ID NO: 971 - DNA, 341 bp, Artificial Sequence
  Synthetic
agggcagcaggtgaatgcgcatctcagagagcagccgggtcacccgtgggttccctcgcaggaactcatggcacaggaactgcatcaggagcagaagcaactcccgccccagggcctcgttcccatgcatgccagccacgtagcgcacctcaggctcccctggggacacatgggggcttgcagcgggttcatgcctggggccctgccctgtgcctacctctccccactccccatgccagtacccagctcatgctccccaggcttgtccgacatttccatcacatacagcttcaggccctggtagctcttcccaatgctgtagatgcgggtgatgttggggc

SEQ ID NO: 972 - DNA, 345 bp, Artificial Sequence
  Synthetic
ggccctggcttggccttaactctgctccaaaatcagactgggtgctgggatcagggaaaggccgggcagagagagtaggcatttctgagcctgcaggggaagcggtgcttcccaggccacgagagcataggaatgcctagatctgcagccatggcctaggagggcagaggtccagctcctccaactcagaagggggcggggcttccacctgtcccagtctcctgcaggctctgtggcatgaaaagccccactgtgtctcccccactgcagctggtgtcttcacagcagtggctctagacaggtcgctgccatcaataaataagtaggccctaaggcctagtttgg

SEQ ID NO: 973 - DNA, 325 bp, Artificial Sequence
  Synthetic
gccactcccctttggtgctgtgacctgcagacccattcatcatggacttttcctcctgcctcagagcccttctcttcattctactccagccctccaccttggggacctaattacccacatgaatgacccgtccggtacccctgcctctcaccacttgacttcctctccttcccttcccaccagctggcctctccgtgttcccgtgggacagtctcgccacccaaaattccaccacaccccagtacttggtttcaagccacgcaccctgaccaccattccttatccttccagcttactggctttagcgttcacgccacacagctct

SEQ ID NO: 974 - DNA, 351 bp, Artificial Sequence
  Synthetic
ccaggagaagaagtggcatccgcggggcagggcgggcggtgacggccggctcaggtggcggccccaccccagcgcccttcagcaggcctgggtcggtcggcctcggaccccgtaggcgccggcggagctggcggcagggacccgacagctctgccgcggactccgcaggggacatcccccaccctggcggcccacccaggcggagcgcggcggggaccgtgcatctagcgcgccctggtgacctgcgggccgaggcgggctgtggggcttggccccgcgactcagccttccgggcccacagcggccctgacccgggaagtgcggaggtttggccgccttcaacagcacctg

SEQ ID NO: 975 - DNA, 338 bp, Artificial Sequence
  Synthetic
cctttgcaatggagggcagggagggcaccctgccctcagtctggctcctgatctaacaccaggaacctcaagtagccaaaatcctttaggagacaaggttcaggtttcacacaggctgtcctgtttagagcaaataaacagcccattcgtgtatattttggaccaggtctctggactgcccgggggcaccttgccacctgttgtgcaacctgcttgttgtggagaattagggaagaacaattctagaaaggggtcccaagtcagttagctgagacggggtattgagagtccttttgggatgcacttcacatggattctgggaggtaggcaggaggttg

SEQ ID NO: 976 - DNA, 434 bp, Artificial Sequence
  Synthetic
caggcctaagccttgatagacagaattttataaaatattttatattttcatttgaagaaaatgttataaacacataagatttgaaaacagtaagcacaaaacacaacaatctaaggtgttttcaagagccacataaaaggattgaaaatcaatttggcaatctttctgaagggtaggtatttagacagagtgcttccagtggctggaaatcattagaaagccaaggcaaggtgcccatggtcacgcagaagggtccctgaaggagccacagctctgcagtgtattctcttggatgatgacagaggccaattatttaatgatacagggaccgatgtggtcattcgataaagttcagtgctttagatatgattgagacagaatgagtgactcttaagattattcatactcaagaggagatccttttgtttgtgtgg

SEQ ID NO: 977 - DNA, 340 bp, Artificial Sequence
  Synthetic
caagagagctactacctcggagcagccttgtctcagacctgcagccaccgtgtctcgaccctccctccctgatccactctgcccgtcagcaggattccggtctacaccccgcagagactccgcagcgtacgaggagaaccccgccttctaccagaaaaagaagcgacttcctagatctcccggaagtccctttcgctcccagcgcttcgcgtaccaggaaggggacggcgtcctgaaagggacatttgaaaaacggaggcaacgcgtctattaattaggtggcggcgcctggggtcgcagcactccagaggctgaggtgggagaatcgctcgagtcaggg

SEQ ID NO: 978 - DNA, 487 bp, Artificial Sequence
  Synthetic
ctcacctgccctgggactgaagcgggggccaccccgagcccgggggtggcggcggcggcggcgcagggggaggagggcagcgcggggctcctggcacagcggccgccgggcgcctggtgctgccgagccgcggacccgcccagagatataaataacattatctgaggagggacattcctgccgggggacatcgctgctgccgggaccagatagtcccgcggcgggggcggggaggcggggccgcagcctcccgcagcgccaagcccagcccccgccttccccacccactcacgcacctgccaatcagcctccgcgcctgggggcacctgccgggcctcagcccggctcctggaacccgcctctgcctccccgcccgccgctgagcctggggcgcctccatcgtcgttcattgcccctaaccccgcgccaccccgagccccctgaggcgggaagggggttggactctagctcgggcctaattcgtgcg

SEQ ID NO: 979 - DNA, 325 bp, Artificial Sequence
  Synthetic
acaactcctggggggtccagatgctcacagctggagaaagtgaacattgactggggtggcagtgtggggccgggtgaaggcagcaactgcggaggaggcaaagaagcccagggaagggtgggcaggagctgctggagtcagagaatgccctagaggcaaatctggggcctgcctcttcccgccagagtaccagagcctgactcagatagcccagccccagaaccccacagagggacatgaagggaaggcacagccatccctctctccagggggccccatgctagagagaggcagtggttaagagccaggctatctgggttcaagc

SEQ ID NO: 980 - DNA, 360 bp, Artificial Sequence
  Synthetic
gctggctgctcatggtccatgtcttctcagctccagtatccaacagtactagcccgtttctgctgaggttgcttacctttggcagggagcctcttgggcaggagtcctgtttccctcctgaggacccacacctgtctgttgcctgccctgctgcctaccattgaaacagggcttgctccaacacagccacctcttttatctctgccaccaggcacctccagccttgggtccttattcctttcaggtatgggtcaagtactagttcttttttctcctcagacttcagggaacacatgtcaagcactccaagggaacctgtgggaagccctttcacaatgaagagaagcggcagcaccttcc

SEQ ID NO: 981 - DNA, 408 bp, Artificial Sequence
  Synthetic
ccctgcctgcaatggtgagctacatctgcatcttcctatttcctttccctgtctttgaaatccagtagagaagcccagaccgcacaatgggaacatcccacctctcagatggcaatgctgcccaagccgctccacccccaggggccttgcttgcatgtgcccgaggccagccctgcagggcagacagtagcacaagagcaccatcttggtcacaaagttgtctaagctcaaagacagccccggaaaaacacctgacacactccacaaataataatcagcagatcttcatgccatcccatgtgacagatggggagcagaggcctagggggctgctggcccctttgctgagagacccctgacaaagttagtccaatgcctctgcaaaatcgcagcagttgcacctcactc

SEQ ID NO: 982 - DNA, 332 bp, Artificial Sequence
  Synthetic
ctgtgggtgcagcttcagcagacttaaatgttcttgcctgccagctctgaagagagcagcagatctcccagcacagtgcttgagcactgctaagggacagactgcctcctcaagtgggtccctgaccccccgtgcctcctgactgggagacaacttccagcagggggcgatagacaccttatacagcagagctgtggctggcatctggcaggtgcccctctgggatgaagctgccggagcaaggagcaggcaggaatttttgctgttctgcagcctccgctggtgataaccaggcaaacagggtctggagtggaccttcagcaaactccagc

SEQ ID NO: 983 - DNA, 368 bp, Artificial Sequence
  Synthetic
gcgcctggctcaagacgaagatttaaccgagaacaaaagaacgtttgccaatcagaaaacgctacccgagaacgaggataaccccgctttgtgttttgaaaactctttaattagcctggtttctaagacgcattaaaacattcctacgcagattctaaatggaggatcaaatggttgcttctgcaacgaagatgggatcccgaaagggcacacgccgcagaaccaaggcacacggggccactgagacgcccggcgcgtcgtacagagtgttcctgggcgctcggtctcaggttacttctagaaccagtctccccaacgccgtcttcgtttccttaaaacctcgctagagtcaccccagttccccagac

SEQ ID NO: 984 - DNA, 331 bp, Artificial Sequence
  Synthetic
tctgtgggcccctcaagaggacctgacatcttctcattcatctctgccttgtttaacagctgggcaaattgaggcccagagaggggcaatgacttgcccagggtcacgcagcgagtctggacaggtagtccagggcccccggggtgtaggctcagcagccagccctagtcagggacagaacacaacctggtgacctctgctttgcctcaggttctagacacagggtgttaggacggttctcggtctgaggtcagttctggggccggcaccggggtgagccacgatctcccactagggggcgccaaaagcccacgtggtcttagccacatct

SEQ ID NO: 985 - DNA, 362 bp, Artificial Sequence
  Synthetic
cggtcttggtttcagacccgccactgagcccacacaccaacagagagaaatatgctgaaatgctgtttgaagccttcaacacccctgcaatgcacatcgcctaccagtcgcgcctgtccatgtactcctatggaaggacctccggcctggtggtggaggtgggccatggcgtgtcctacgtggtccccatctacgagggttatcctttgcccagcatcaccggaaggctggactacgcgggctctgacctgacagcctacctgctgggcctgctgaacagtgcggggaacgaattcacccaggaccagatgggcatcgtggaggacatcaagaagaaatgctgctttgtggccctggatccc

SEQ ID NO: 986 - DNA, 340 bp, Artificial Sequence
  Synthetic
ccgagatcacgccagtgcacttcagcctgggcgactgagtgaggctccatctcaaaaaagaaaaaactttggtacagataatctggctcctccctgggcatcacccccgggagcctactccactccattagcctacagccctgcctctgacttcaaaccctaagcatgatggccatgaatactaaaaaaatactcaacatcagtatcaactgagtaccctttctaggtatctatattagacactttttctgctgaaacccttttatgagtaaaaaaaggaactgaatgtttatacaaaagtttatgtaaatctttagatgatgacctggcatggtggctc

SEQ ID NO: 987 - DNA, 490 bp, Artificial Sequence
  Synthetic
ggggaaggggaaagaggcagttaatatttaacaagcacagagtttttgttggggatgattatgcaacattatgactgtatttaatgccagtgaattgcacacttacaaatcattaaaatgataaatattaggttatagtatattttaccaacattaaaaaaaccaacatgtattaaatccacagctgggcagtcctcttgaccttgcagactggcaggagtgaaccatcatttattactttgggcttctcagtaaaaaaaaaaaaaatatatatatatatacacacacacacacacacacatatatatatatatacacatatatatatatatataccataagcaaagtattagggaaccaaaggaactagacaattttataagggggcccacttaaaatccaggctgttgagccaggtgcagtggcttaaacctataatccaagcacctttggaggccaaggcaagaggatcatgtgagcccaggaggcc

SEQ ID NO: 988 - DNA, 418 bp, Artificial Sequence
  Synthetic
gctggactgtcgcacctctgatctcagatcaggatggaaaggaaggaactgagagctaaaaagagaaatggagatcactacggtagaaccaactaacctggagttcagccggtcatttgggagactatcctgagggattatcttttggggtcatgagcaattaggatctctgagatctgctgactcctgtggcatcatctggacagtatgccttctcatcagggtacccaggaggcctgtcccctccttccccgggagggactctggcatgtccttcaaaacgcagctcacacataatccctgctgagctttccagaatgtctccagaaagaactgtttcctctgcacttttcggttgttctggtagctcactcttcgccataattacttatctgctagtgctgtgtcccctcaaccc

SEQ ID NO: 989 - DNA, 331 bp, Artificial Sequence
  Synthetic
gtcccctccaccccttagactccagccagattcaggcattccctgcatcccacgccaatgcatcactgtccccatcctaagtatcgtggataagctgcagtgacaagccccagggcctcctgtcgaaaacggtgtcagcctggccgggcacaggctggtctccaagactctgtgccctggactcagctcatagcagctccttcctgttgttcaggtctcgatttcaaggacaccatcgcaaagactgtccccaagcacttcacaaaagctacccacctccacctctcacgctgtctgcgtctcccctcagagcacctggcaccacctgaac

SEQ ID NO: 990 - DNA, 495 bp, Artificial Sequence
  Synthetic
ccttcctctgtggtgtgactttcagttgcttctagattttactcttctaactcaacagttaatgcttttgtgggataaaatttcccttcatatttaggattattcctttaggttaactctcaggcctactagtcctctgattcacactgtctttttaatttttcccaatctattacatattttctaaattttgtacaccattcatatgtcatgtgtatcatatcaaagagcctagagaaaattttcctctgtgtgttcctcactgggtggttacaatggagaaattacagggcaggactagcattagggtgaggagagcaaggcactcaggcgcaaaacttaagggggcaccaatatcctcagtgatcaagagaagtaatattgtcacgtaactgtattagctttttagggctactactgtaatgaagtacagtattctctcttatccatggggaaatgcattccaaaacccccagcagatgcctgaaaccacag

SEQ ID NO: 991 - DNA, 347 bp, Artificial Sequence
  Synthetic
ggagcaagtggtccctgtggaaagccgctgcactaggtgagcccggccctggtgagggtgccttgtgagtggagcctgcttgtgctgctgtgccccgctgcttccaggcggcgcggccctccgtctgattgctggaggactcttcggtgtggacacaccgtggtttgtttacccatcctggtcaatggacaattggaactgtggtgaacaagcattcctgcacctgtatgtggatattgtatgtccatttttcttgggagtggaatggctgagtcatctggtaggtgtctttaccttttaaagaactaagcgctttttccagaaggatcatcagaactgctgccagc

SEQ ID NO: 992 - DNA, 518 bp, Artificial Sequence
  Synthetic
gggaatgctggcactgtctaggatagaatgttcctaattatagtagcttacccattgaaggctgaaataaaacatgcaaggatgtgtgtgtttgtgtgtgtgtgtgtatgtgtgtaaaggctttagaaagctgatgagacctgaggtactcaatctccaagagaagaaaactgagcaccctgaggacagttagggaacagggctgttgaatcatagcagacagcaacagggcctctagtgtgcaaacagaattggagttcagatcctccaaagtggctgtgatctgaaagacaaaactgacatcaaagaatcctcacagaagcgagcggaaatatttttatatacttttacaaatcctttgcaaaattcaaaactttgcatacagaagtcaagacaaagtaagatgctcagaaggctgtaatccctggaaggctagagaattaagcagtatcagagatgtaagatgctagcaagaacaaagttgattttaatctgaacacagtagcactgaaacgggc

SEQ ID NO: 993 - DNA, 343 bp, Artificial Sequence
  Synthetic
gggcttctggcatcactgggagtcctggccaggccccaggcacaccacagtgggggacaggagccccagcccagctgggagaggcaggcctccttgatccctatcagcccggatgttggggagggggtatggtgctggtcgggtccttgggatccctaggtggctcggggctccagagtacaggctctgatacgtgacaggcctgtaggtggccggggccagcaggacctcaggtgggggcagcagctgatgatggagccaagcaggggtcttggaggtggaagctgaagctttgttggggtctgagggaggaaatgagtggactctgggcctcccatcgcat

SEQ ID NO: 994 - DNA, 343 bp, Artificial Sequence
  Synthetic
cgctcttcccaagctcccgttggccctcaccgtcgaagtcaatgcggccgtcgttgttcttgtcgccgtctttcatcagagattcgatctcctcgtccgtcacgtgctccccggaggccctgaaaatctcagccagctcctccgggtcgatgtagccgtctgcattccttcaggtccgagggacagggcagggctcagggccggggcgagctgccctggccaccacactcgacgccccgcttccgcactcccaacacggggaagcttccagcgctgccggccgggttctgactgctaagcccctccctcggctcccgggcccccagcgcacctgtcgaagatg

SEQ ID NO: 995 - DNA, 365 bp, Artificial Sequence
  Synthetic
ggtgttctcacaccccaggtgtcctcacaaggggcttgggcgcagaacagggcttgggggcgggtagcggggcaaagcgtcttcgggggcggagatcagtgacccggcagggaggccgcacctggtccacgaggccctcggggttgagcagcgtggccctcgcgatggtgttcacctgcagcgtgtatcgagtgtgggggagtaggagctgcgagcggagcggatcacgtgagctgaaggccggggacaaggccgcccggcccctgccccgctgggcccccacccggggtcgcggaccttgtagatggggtggcagagcggcagctggcgcagcgtggccatggcgaaggcctcgcacagcaaat

SEQ ID NO: 996 - DNA, 398 bp, Artificial Sequence
  Synthetic
tggcctcccagattgctgggattataggcgtgagccaggagtggtcatttttgaaaaggtcctaagcttactgatttttttttcctaaaatcatctggtttgttaaaaattatttctttagaagcttaaaaaaataacacaaaataaagcactgtccttgttctgcaggtgatcggtgtctttggtgagtctgttaaaggctatggggaggtgacaaggcggggtcgccggcagcatgtcaggtactgtggcttgaattcagaggaggctctggggagatttttaaatgaaaggaacttagactgatctttcgttttctcgacaggttcactgaatatgtaaaagatgggctgaaacacacgtgtgtgaaattctacattgagggctctgagccaggg

SEQ ID NO: 997 - DNA, 395 bp, Artificial Sequence
  Synthetic
gcttggagctgggccatcagatcagatgaagaggtaagaagagccttgcagtggacgcagggtgatcaccaagggaggggggggaaggctagccaagtccaggctgcagagccatggggcactggcagcagtgagacagccgctctgtgtgaccaggctggggaggcagtgctctgggtcacctgcctgcgctgggctggacggcgagatgacaccttcatccctctttcagccacactgtccagagtgagttcacaccctcattatatctcacctggaacattccagcagcccttcacttgtcctcccccacacaccaacatgatctgtctgaatcacaaatctgatcccacttctccttgatgataacattcgatgtctccccatgtgccagc

SEQ ID NO: 998 - DNA, 426 bp, Artificial Sequence
  Synthetic
ctgtacacacgcccagatggctgtttagaaaagaacctcaccctgatttccaacaaggtttcccctggagagtctacgagttttagaggcagaggcagttgttggaactgtgttcaccaggatgaaggaagaaaggaagggatgttctcagcaaagagcctgggcctggcctggtccttgccagtcctgcctcatgacagccgccactgcccgagagagcctcccagcccagccgcctgcagggcatcctccgccctgggttgggggctgtgagctcacatgctttggggactacagggtcatgaaactgagcaaaggggctggtgtaagaggattgagcaatggacacactgcctcggcggtcagggacaaaagggagtgtgaggaccgtgatgaactggagcacatgggcccatccgaaagagg

SEQ ID NO: 999 - DNA, 360 bp, Artificial Sequence
  Synthetic
gcttctcctgaagaccacgtttcctgcccggtcggccttccaccctttcaccagggcgaagtctgcccggatggcgcgctccaaaaggaagtggtcgccgttgaactccctcacctctcggggctggctcatgagcgccaggtggccgtccggggtgtagcggatgggggcgcccccttcctggaccagggtcccgtagcccgtgggggtgtagaaggcgggcaccccggcgccccccgcgcggatgcgctcggccagggtgccctggggcgtgagctccagctccagctctcctgccaggtactggctctcgcacagggtgttctcgcccacgtaggaacagacgatgcgacggacctg

SEQ ID NO: 1000 - DNA, 342 bp, Artificial Sequence
  Synthetic
tgttcctacgtgggcgagaacaccctgtgcgagagccagtacctggcaggagagctggagctggagctcacgccccagggcaccctggccgagcgcatccgcgcggggggcgccggggtgcccgccttctacacccccacgggctacgggaccctggtccaggaagggggcgcccccatccgctacaccccggacggccacctggcgctcatgagccagccccgagaggtgagggagttcaacggcgaccacttccttttggagcgcgccatccgggcagacttcgccctggtgaaagggtggaaggccgaccgggcaggaaacgtggtcttcaggagaagc

SEQ ID NO: 1001 - DNA, 431 bp, Artificial Sequence
  Synthetic
ctgttttccacagtggccgaaccattttctatttccaccagcaatgtagcgaattccaatttctccatttcctcaccaatacttggtattgtcctctaaaaaaagatcctagctgttctagcgggtgtgaggtggtatctcatggtggttttgatttgcatttccctaatggctaatgatgctgagcatctcttcctgtgcttgttggctgtctgtatatcgactttggagagcgtattgattttgcattcctggtgcctcctgcagggcctggtgcggacccagtgctccagacggctctgctgagtaaagaacaggagaataaacaagttgtgttcccctgccgtggtccacgctgggctccttgtggacatacctgtctcgtgaggcagtgagacccctttgacattccaggctgggtgagtcttacc

SEQ ID NO: 1002 - DNA, 554 bp, Artificial Sequence
  Synthetic
ctgcacacttgcacacacacaggcaggtataggcacacagttccaccaaagcgaagtccaaatcagagttcttaccgattctaccactctgtaatactctcagaagttcccacaactgcccaacacctcacctacccgtttcctgctgcacaaagtctccttcactctcatcttttcgatacatcgtcaggcagggcagaagggcactacgccgcagagcattcgaggctctcagcacactgccagccagcgtgaaaatgcggcttcactacagcccagagaaaagggccaggtttagtcatcgatccagatgcattttcccgggaaatgaccattcccaaacccacagaacagtttggcttctctggatatccttataggaaataggggtgagaggtgggaaaagcttctcaatctcatacagaaacagcacaaatatttaatacaccttttgcaacaagatcttctctgttctccattaagcatcatgtaaatctcactagtgtggttaacaaaatggctttccccaaggacagaagtcaagagcttgtggg

SEQ ID NO: 1003 - DNA, 39 bp, Artificial Sequence
  Synthetic
  misc_feature (19)..(19): n is a, c, g, or t
  misc_feature (21)..(21): n is a, c, g, or t
ccgacttcgcgtttttttngnttatttcagcaaacgacg

SEQ ID NO: 1004 - DNA, 39 bp, Artificial Sequence
  Synthetic
  misc_feature (19)..(19): n is a, c, g, or t
  misc_feature (21)..(21): n is a, c, g, or t
ggctgaagcgcaaaaaaancnaataaagtcgtttgctgc

SEQ ID NO: 1005 - DNA, 15 bp, Artificial Sequence
  Synthetic
ccacctacctccctc

SEQ ID NO: 1006 - DNA, 18 bp, Artificial Sequence
  Synthetic
cacttcaacctccctcac

SEQ ID NO: 1007 - DNA, 15 bp, Artificial Sequence
  Synthetic
ccacctacctccctc

SEQ ID NO: 1008 - DNA, 6 bp, Artificial Sequence
  Synthetic
  misc_feature (4)..(4): n is a, c, g, or t
tggncc

SEQ ID NO: 1009 - DNA, 6 bp, Artificial Sequence
  Synthetic
  misc_feature (4)..(4): n is a, c, g, or t
accngg

SEQ ID NO: 1010 - DNA, 6 bp, Artificial Sequence
  Synthetic
  misc_feature (4)..(4): n is a, c, g, or t
tagncc

SEQ ID NO: 1011 - DNA, 6 bp, Artificial Sequence
  Synthetic
  misc_feature (4)..(4): n is a, c, g, or t
atcngg

SEQ ID NO: 1012 - DNA, 6 bp, Artificial Sequence
  Synthetic
  misc_feature (4)..(4): n is a, c, g, or t
tgancc

SEQ ID NO: 1013 - DNA, 6 bp, Artificial Sequence
  Synthetic
  misc_feature (4)..(4): n is a, c, g, or t
actngg

SEQ ID NO: 1014 - DNA, 6 bp, Artificial Sequence
  Synthetic
  misc_feature (4)..(4): n is a, c, g, or t
taancc

SEQ ID NO: 1015 - DNA, 6 bp, Artificial Sequence
  Synthetic
  misc_feature (4)..(4): n is a, c, g, or t
attngg

SEQ ID NO: 1016 - DNA, 15 bp, Artificial Sequence
  Synthetic
  misc_feature (8)..(8): n is a, c, g, or t
cgcctggnccagggc

SEQ ID NO: 1017 - DNA, 15 bp, Artificial Sequence
  Synthetic
  misc_feature (8)..(8): n is a, c, g, or t
gcggaccnggtcccg

SEQ ID NO: 1018 - DNA, 18 bp, Artificial Sequence
  Synthetic
cacttcaacctccctcac

SEQ ID NO: 1019 - DNA, 18 bp, Artificial Sequence
  Synthetic
gtgaagttggagggagtg

SEQ ID NO: 1020 - DNA, 15 bp, Artificial Sequence
  Synthetic
ccacctacctccctc

SEQ ID NO: 1021 - DNA, 15 bp, Artificial Sequence
  Synthetic
ggtggatggagggag

SEQ ID NO: 1022 - DNA, 18 bp, Artificial Sequence
  Synthetic
cacttcaacctttctcac

SEQ ID NO: 1023 - DNA, 18 bp, Artificial Sequence
  Synthetic
cacttcaaccttcctcac

SEQ ID NO: 1024 - DNA, 18 bp, Artificial Sequence
  Synthetic
cacttcaatctccctcac

SEQ ID NO: 1025 - DNA, 18 bp, Artificial Sequence
  Synthetic
cacttcaacctttttcac

SEQ ID NO: 1026 - DNA, 18 bp, Artificial Sequence
  Synthetic
cacttcaacttttctcac

SEQ ID NO: 1027 - DNA, 18 bp, Artificial Sequence
  Synthetic
cacttcaacctttcttac

SEQ ID NO: 1028 - DNA, 15 bp, Artificial Sequence
  Synthetic
ccacctacctccctc

SEQ ID NO: 1029 - DNA, 15 bp, Artificial Sequence
  Synthetic
ccacctacctttctc

SEQ ID NO: 1030 - DNA, 15 bp, Artificial Sequence
  Synthetic
ccacctaccttcctc

SEQ ID NO: 1031 - DNA, 15 bp, Artificial Sequence
  Synthetic
ccacctacctttttc

SEQ ID NO: 1032 - DNA, 15 bp, Artificial Sequence
  Synthetic
ccacctacttttctc

SEQ ID NO: 1033 - DNA, 39 bp, Artificial Sequence; identical to SEQ ID NO: 1003
  Synthetic
  misc_feature (19)..(19): n is a, c, g, or t
  misc_feature (21)..(21): n is a, c, g, or t

SEQ ID NO: 1034 - DNA, 39 bp, Artificial Sequence; identical to SEQ ID NO: 1004
  Synthetic
  misc_feature (19)..(19): n is a, c, g, or t
  misc_feature (21)..(21): n is a, c, g, or t

SEQ ID NO: 1035 - DNA, 18 bp, Artificial Sequence
  Synthetic
gccgtacgcggacaaggg

SEQ ID NO: 1036 - DNA, 18 bp, Artificial Sequence
  Synthetic
cggcatgcgcctgttccc

SEQ ID NO: 1037 - DNA, 16 bp, Artificial Sequence
  Synthetic
tgggaatggcctgcct

SEQ ID NO: 1038 - DNA, 16 bp, Artificial Sequence
  Synthetic
acccttaccggacgga

SEQ ID NO: 1039 - protein, 5 aa, Artificial Sequence
  Synthetic
HMALV

SEQ ID NO: 1040 - DNA, 15 bp, Artificial Sequence
  Synthetic
cacatagccctcgta

SEQ ID NO: 1041 - DNA, 15 bp, Artificial Sequence
  Synthetic
gtgtatcgggagcat

SEQ ID NO: 1042 - protein, 5 aa, Artificial Sequence
  Synthetic
GAVIL

SEQ ID NO: 1043 - DNA, 15 bp, Artificial Sequence
  Synthetic
ggcgcagtcattctc

SEQ ID NO: 1044 - DNA, 15 bp, Artificial Sequence
  Synthetic
ccgcgtcagtaagag

SEQ ID NO: 1045 - protein, 6 aa, Artificial Sequence
  Synthetic
IGINQP

SEQ ID NO: 1046 - DNA, 18 bp, Artificial Sequence
  Synthetic
atcggcatcaaccaacca

SEQ ID NO: 1047 - DNA, 18 bp, Artificial Sequence
  Synthetic
tagccgtagttggttggt

SEQ ID NO: 1048 - DNA, 14 bp, Artificial Sequence
  Synthetic
cctgatcaaatatc

SEQ ID NO: 1049 - DNA, 14 bp, Artificial Sequence
  Synthetic
ggactagtttatag

SEQ ID NO: 1050 - DNA, 16 bp, Artificial Sequence
  Synthetic
actcaatcctctgatc

SEQ ID NO: 1051 - DNA, 16 bp, Artificial Sequence
  Synthetic
tgagttaggagactag

SEQ ID NO: 1052 - DNA, 14 bp, Artificial Sequence
  Synthetic
accgaacgaaaaat

SEQ ID NO: 1053 - DNA, 14 bp, Artificial Sequence
  Synthetic
tggcttgcttttta

SEQ ID NO: 1054 - DNA, 15 bp, Artificial Sequence
  Synthetic
tacccacataggatg

SEQ ID NO: 1055 - DNA, 15 bp, Artificial Sequence
  Synthetic
atgggtgtatcctac

SEQ ID NO: 1056 - DNA, 18 bp, Artificial Sequence
  Synthetic
cacttcaacttttttcac

SEQ ID NO: 1057 - DNA, 18 bp, Artificial Sequence
  Synthetic
cacttcaatttttctcac

SEQ ID NO: 1058 - DNA, 18 bp, Artificial Sequence
  Synthetic
cacttcaatttttttcac

SEQ ID NO: 1059 - DNA, 18 bp, Artificial Sequence
  Synthetic
cacttcaaccttcctcac

SEQ ID NO: 1060 - DNA, 15 bp, Artificial Sequence
  Synthetic
ccacctatttttctc

SEQ ID NO: 1061 - DNA, 18 bp, Artificial Sequence
  Synthetic
gccgtacgcggacaaggg

SEQ ID NO: 1062 - DNA, 18 bp, Artificial Sequence
  Synthetic
gccgtacgcaaacaaggg

SEQ ID NO: 1063 - DNA, 18 bp, Artificial Sequence
  Synthetic
gccatacgcaaacaaggg

SEQ ID NO: 1064 - DNA, 18 bp, Artificial Sequence
  Synthetic
gccatacacaaacaaggg

SEQ ID NO: 1065 - DNA, 18 bp, Artificial Sequence
  Synthetic
gccgtacacaaacaaggg

SEQ ID NO: 1066 - DNA, 18 bp, Artificial Sequence
  Synthetic
gccatacgcggacaaggg

SEQ ID NO: 1067 - DNA, 18 bp, Artificial Sequence
  Synthetic
gccatacataaacaaggg

SEQ ID NO: 1068 - DNA, 18 bp, Artificial Sequence
  Synthetic
gccgtacataaacaaggg

SEQ ID NO: 1069 - DNA, 18 bp, Artificial Sequence
  Synthetic
gccgtacgcgaacaaggg

SEQ ID NO: 1070 - DNA, 16 bp, Artificial Sequence
  Synthetic
gccgtacggacaaggg

SEQ ID NO: 1071 - DNA, 16 bp, Artificial Sequence
  Synthetic
tgggaatggtttgcct

SEQ ID NO: 1072 - DNA, 16 bp, Artificial Sequence
  Synthetic
tgggaataatttgcct

SEQ ID NO: 1073 - DNA, 16 bp, Artificial Sequence
  Synthetic
tgggaatagtttgcct

SEQ ID NO: 1074 - DNA, 16 bp, Artificial Sequence
  Synthetic
tggaaataatttgcct

SEQ ID NO: 1075 - DNA, 16 bp, Artificial Sequence
  Synthetic
tggaaatagtttgcct

SEQ ID NO: 1076 - DNA, 16 bp, Artificial Sequence
  Synthetic
tggaaatggtttgcct

SEQ ID NO: 1077 - DNA, 16 bp, Artificial Sequence
  Synthetic
tgaaaataatttgcct

SEQ ID NO: 1078 - DNA, 16 bp, Artificial Sequence
  Synthetic
tgggaatgggttgcct

SEQ ID NO: 1079 - DNA, 16 bp, Artificial Sequence
  Synthetic
tgggaatggtttgctt

SEQ ID NO: 1080 - DNA, 15 bp, Artificial Sequence
  Synthetic
cgcctcgcraagggc

SEQ ID NO: 1081 - DNA, 15 bp, Artificial Sequence
  Synthetic
gcggagcgyttcccg

SEQ ID NO: 1082 - DNA, 13 bp, Artificial Sequence
  Synthetic
acatagccctcgt

SEQ ID NO: 1083 - DNA, 13 bp, Artificial Sequence
  Synthetic
tgtatcgggagca

SEQ ID NO: 1084 - DNA, 16 bp, Artificial Sequence
  Synthetic
tcggcatcaaccaacc

SEQ ID NO: 1085 - DNA, 16 bp, Artificial Sequence
  Synthetic
agccgtagttggttgg

SEQ ID NO: 1086 - DNA, 13 bp, Artificial Sequence
  Synthetic
acatagcttttgt

SEQ ID NO: 1087 - DNA, 13 bp, Artificial Sequence
  Synthetic
acatagctttcgt

SEQ ID NO: 1088 - DNA, 13 bp, Artificial Sequence
  Synthetic
acataaccctcgt

SEQ ID NO: 1089 - DNA, 13 bp, Artificial Sequence
  Synthetic
acatagcccttgt

SEQ ID NO: 1090 - DNA, 13 bp, Artificial Sequence
  Synthetic
acatagtttttgt

SEQ ID NO: 1091 - DNA, 13 bp, Artificial Sequence
  Synthetic
acataacttttgt

SEQ ID NO: 1092 - DNA, 13 bp, Artificial Sequence
  Synthetic
acataacccttgt

SEQ ID NO: 1093 - DNA, 13 bp, Artificial Sequence
  Synthetic
acataactttcgt

SEQ ID NO: 1094 - DNA, 13 bp, Artificial Sequence
  Synthetic
ggcgcagtcattc

SEQ ID NO: 1095 - DNA, 13 bp, Artificial Sequence
  Synthetic
ggcgcaattattc

SEQ ID NO: 1096 - DNA, 13 bp, Artificial Sequence
  Synthetic
ggcgcagttattc

SEQ ID NO: 1097 - DNA, 13 bp, Artificial Sequence
  Synthetic
ggcgcaattattt

SEQ ID NO: 1098 - DNA, 13 bp, Artificial Sequence
  Synthetic
agcgcaattattc

SEQ ID NO: 1099 - DNA, 13 bp, Artificial Sequence
  Synthetic
ggcacaattattc

SEQ ID NO: 1100 - DNA, 13 bp, Artificial Sequence
  Synthetic
ggcgcagttattt

SEQ ID NO: 1101 - DNA, 13 bp, Artificial Sequence
  Synthetic
ggcacagttattc

SEQ ID NO: 1102 - DNA, 16 bp, Artificial Sequence
  Synthetic
tcggcatcaattaacc

SEQ ID NO: 1103 - DNA, 16 bp, Artificial Sequence
  Synthetic
tcggcattaattaacc

SEQ ID NO: 1104 - DNA, 16 bp, Artificial Sequence
  Synthetic
tcggcatcaatcaacc

SEQ ID NO: 1105 - DNA, 16 bp, Artificial Sequence
  Synthetic
ttggcatcaattaacc

SEQ ID NO: 1106 - DNA, 18 bp, Artificial Sequence
  Synthetic
cggcatgcgcctgttccc

SEQ ID NO: 1107 - protein, 7 aa, Artificial Sequence
  Synthetic
VRVRFRR

SEQ ID NO: 1108 - protein, 4 aa, Artificial Sequence
  Synthetic
VRER

SEQ ID NO: 1109 - protein, 4 aa, Artificial Sequence
  Synthetic
NGCG

SEQ ID NO: 1110 - protein, 4 aa, Artificial Sequence
  Synthetic
  misc_feature (1)..(1): Xaa can be any naturally occurring amino acid
XIII

SEQ ID NO: 1111 - protein, 4 aa, Artificial Sequence
  Synthetic
TTTN

SEQ ID NO: 1112 - protein, 4 aa, Artificial Sequence
  Synthetic
VRQR

SEQ ID NO: 1113 - protein, 6 aa, Artificial Sequence
  Synthetic
HGADFN
